United States Patent Application Publication US 2026/0258423 A1 - sequence listing, part 9

SEQ ID NO: 167803 - DNA, 46709983 bp, Homo sapiens (residues 3,336,429-5,004,642 of 46,709,983)
  source 1..46709983: mol_type = genomic DNA
nnnnnnnnnnnnnnnnnnnnnnnnnnnnnnnnnnnnnnnnnnnnnnnnnnnnnnnnnnnnnnnnnnnnnnnnnnnnnnnnnnnnnnnnnnnnnnnnnnnnnnnnnnnnnnnnnnnnnnnnnnnnnnnnnnnnnnnnnnnnnnnnnnnnnnnnnnnnnnnnnnnnnnnnnnnnnnnnnnnnnnnnnnnnnnnnnnnnnnnnnnnnnnnnnnnnnnnnnnnnnnnnnnnnnnnnnnnnnnnnnnnnnnnnnnnnnnnnnnnnnnnnnnnnnnnnnnnnnnnnnnnnnnnnnnnnnnnnnnnnnnnnnnnnnnnnnnnnnnnnnnnnnnnnnnnnnnnnnnnnnnnnnnnnnnnnnnnnnnnnnnnnnnnnnnnnnnnnnnnnnnnnnnnnnnnnnnnnnnnnnnnnnnnnnnnnnnnnnnnnnnnnnnnnnnnnnnnnnnnnnnnnnnnnnnnnnnnnnnnnnnnnnnnnnnnnnnnnnnnnnnnnnnnnnnnnnnnnnnnnnnnnnnnnnnnnnnnnnnnnnnnnnnnnnnnnnnnnnnnnnnnnnnnnnnnnnnnnnnnnnnnnnnnnnnnnnnnnnnnnnnnnnnnnnnnnnnnnnnnnnnnnnnnnnnnnnnnnnnnnnnnnnnnnnnnnnnnnnnnnnnnnnnnnnnnnnnnnnnnnnnnnnnnnnnnnnnnnnnnnnnnnnnnnnnnnnnnnnnnnnnnnnnnnnnnnnnnnnnnnnnnnnnnnnnnnnnnnnnnnnnnnnnnnnnnnnnnnnnnnnnnnnnnnnnnnnnnnnnnnnnnnnnnnnnnnnnnnnnnnnnnnnnnnnnnnnnnnnnnnnnnnnnnnnnnnnnnnnnnnnnnnnnnnnnnnnnnnnnnnnnnnnnnnnnnnnnnnnnnnnnnnnnnnnnnnnnnnnnnnnnnnnnnnnnnnnnnnnnnnnnnnnnnnnnnnnnnnnnnnnnnnnnnnnnnnnnnnnnnnnnnnnnnnnnnnnnnnnnnnnnnnnnnnnnnnnnnnnnnnnnnnnnnnnnnnnnnnnnnnnnnnnnnnnnnnnnnnnnnnnnnnnnnnnnnnnnnnnnnnnnnnnnnnnnnnnnnnnnnnnnnnnnnnnnnnnnnnnnnnnnnnnnnnnnnnnnnnnnnnnnnnnnnnnnnnnnnnnnnnnnnnnnnnnnnnnnnnnnnnnnnnnnnnnnnnnnnnnnnnnnnnnnnnnnnnnnnnnnnnnnnnnnnnnnnnnnnnnnnnnnnnnnnnnnnnnnnnnnnnnnnnnnnnnnnnnnnnnnnnnnnnnnnnnnnnnnnnnnnnnnnnnnnnnnnnnnnnnnnnnnnnnnnnnnnnnnnnnnnnnnnnnnnnnnnnnnnnnnnnnnnnnnnnnnnnnnnnnnnnnnnnnnnnnnnnnnnnnnnnnnnnnnnnnnnnnnnnnnnnnnnnnnnnnnnnnnnnnnnnnnnnnnnnnnnnnnnnnnnnnnnnnnnnnnnnnnnnnnnnnnnnnnnnnnnnnnnnnnnnnnnnnnnnnnnnnnnnnnnnnnnnnnnnnnnnnnnnnnnnnnnnnnnnnnnnnnnnnnnnnnnnnnnnnnnnnnnnnnnnnnnnnnnnnnnnnnnnnnnnnnnnnnnnnnnnnnnnnnnnnnnnnnnnnnnnnnnnnnnnnnnnnnnnnnnnnnnnnnnnnnnnnnnnnnnnnnnnnnnnnnnnnnnnnnnnnnnnnnnnnnnnnnnnnnnnnnnnnnnnnnnnnnnnnnnnnnnnnnnnnnnnnnnnnnnnnnnnnnnnnnnnnnnnnnnnnnnnnnnnnnnnnnnnnnnnnnnnnnnnnnnnnnnnnnnnnnnnnnnnnnnnnnnnnnnnnnnnnnnnnnnnnnnnnnnnnnnnnnnnnnnnnnnnnnnnnnnnnnnnnnnnnnnnnnnnnnnnnnnnnnnnnnnnnnnnnnnnnnnnnnnnnnnnnnnnnnnnnnnnnnnnnnnnnnnnnnnnnnnnnnnnnnnnnnnnnnnnnnnnnnnnnnnnnnnnnnnnnnnnnnnnnnnnnnnnnnnnnnnnnnnnnnnnnnnnnnnnnnnnnnnnnnnnnnnnnnnnnnnnnnnnnnnnnnnnnnnnnnnnnnnnnnnnnnnnnnnnnnnnnnnnnnnnnnnnnnnnnnnnnnnnnnnnnnnnnnnnnnnnnnnnnnnnnnnnnnnnnnnnnnnnnnnnnnnnnnnnnnnnnnnnnnnnnnnnnnnnnnnnnnnnnnnnnnnnnnnnnnnnnnnnnnnnnnnnnnnnnnnnnnnnnnnnnnnnnnnnnnnnnnnnnnnnnnnnnnnnnnnnnnnnnnnnnnnnnnnnnnnnnnnnnnnnnnnnnnnnnnnnnnnnnnnnnnnnnnnnnnnnnnnnnnnnnnnnnnnnnnnnnnnnnnnnnnnnnnnnnnnnnnnnnnnnnnnnnnnnnnnnnnnnnnnnnnnnnnnnnnnnnnnnnnnnnnnnnnnnnnnnnnnnnnnnnnnnnnnnnnnnnnnnnnnnnnnnnnnnnnnnnnnnnnnnnnnnnnnnnnnnnnnnnnnnnnnnnnnnnnnnnnnnnnnnnnnnnnnnnnnnnnnnnnnnnnnnnnnnnnnnnnnnnnnnnnnnnnnnnnnnnnnnnnnnnnnnnnnnnnnnnnnnnnnnnnnnnnnnnnnnnnnnnnnnnnnnnnnnnnnnnnnnnnnnnnnnnnnnnnnnnnnnnnnnnnnnnnnnnnnnnnnnnnnnnnnnnnnnnnnnnnnnnnnnnnnnnnnnnnnnnnnnnnnnnnnnnnnnnnnnnnnnnnnnnnnnnnnnnnnnnnnnnnnnnnnnnnnnnnnnnnnnnnnnnnnnnnnnnnnnnnnnnnnnnnnnnnnnnnnnnnnnnnnnnnnnnnnnnnnnnnnnnnnnnnnnnnnnnnnnnnnnnnnnnnnnnnnnnnnnnnnnnnnnnnnnnnnnnnnnnnnnnnnnnnnnnnnnnnnnnnnnnnnnnnnnnnnnnnnnnnnnnnnnnnnnnnnnnnnnnnnnnnnnnnnnnnnnnnnnnnnnnnnnnnnnnnnnnnnnnnnnnnnnnnnnnnnnnnnnnnnnnnnnnnnnnnnnnnnnnnnnnnnnnnnnnnnnnnnnnnnnnnnnnnnnnnnnnnnnnnnnnnnnnnnnnnnnnnnnnnnnnnnnnnnnnnnnnnnnnnnnnnnnnnnnnnnnnnnnnnnnnnnnnnnnnnnnnnnnnnnnnnnnnnnnnnnnnnnnnnnnnnnnnnnnnnnnnnnnnnnnnnnnnnnnnnnnnnnnnnnnnnnnnnnnnnnnnnnnnnnnnnnnnnnnnnnnnnnnnnnnnnnnnnnnnnnnnnnnnnnnnnnnnnnnnnnnnnnnnnnnnnnnnnnnnnnnnnnnnnnnnnnnnnnnnnnnnnnnnnnnnnnnnnnnnnnnnnnnnnnnnnnnnnnnnnnnnnnnnnnnnnnnnnnnnnnnnnnnnnnnnnnnnnnnnnnnnnnnnnnnnnnnnnnnnnnnnnnnnnnnnnnnnnnnnnnnnnnnnnnnnnnnnnnnnnnnnnnnnnnnnnnnnnnnnnnnnnnnnnnnnnnnnnnnnnnnnnnnnnnnnnnnnnnnnnnnnnnnnnnnnnnnnnnnnnnnnnnnnnnnnnnnnnnnnnnnnnnnnnnnnnnnnnnnnnnnnnnnnnnnnnnnnnnnnnnnnnnnnnnnnnnnnnnnnnnnnnnnnnnnnnnnnnnnnnnnnnnnnnnnnnnnnnnnnnnnnnnnnnnnnnnnnnnnnnnnnnnnnnnnnnnnnnnnnnnnnnnnnnnnnnnnnnnnnnnnnnnnnnnnnnnnnnnnnnnnnnnnnnnnnnnnnnnnnnnnnnnnnnnnnnnnnnnnnnnnnnnnnnnnnnnnnnnnnnnnnnnnnnnnnnnnnnnnnnnnnnnnnnnnnnnnnnnnnnnnnnnnnnnnnnnnnnnnnnnnnnnnnnnnnnnnnnnnnnnnnnnnnnnnnnnnnnnnnnnnnnnnnnnnnnnnnnnnnnnnnnnnnnnnnnnnnnnnnnnnnnnnnnnnnnnnnnnnnnnnnnnnnnnnnnnnnnnnnnnnnnnnnnnnnnnnnnnnnnnnnnnnnnnnnnnnnnnnnnnnnnnnnnnnnnnnnnnnnnnnnnnnnnnnnnnnnnnnnnnnnnnnnnnnnnnnnnnnnnnnnnnnnnnnnnnnnnnnnnnnnnnnnnnnnnnnnnnnnnnnnnnnnnnnnnnnnnnnnnnnnnnnnnnnnnnnnnnnnnnnnnnnnnnnnnnnnnnnnnnnnnnnnnnnnnnnnnnnnnnnnnnnnnnnnnnnnnnnnnnnnnnnnnnnnnnnnnnnnnnnnnnnnnnnnnnnnnnnnnnnnnnnnnnnnnnnnnnnnnnnnnnnnnnnnnnnnnnnnnnnnnnnnnnnnnnnnnnnnnnnnnnnnnnnnnnnnnnnnnnnnnnnnnnnnnnnnnnnnnnnnnnnnnnnnnnnnnnnnnnnnnnnnnnnnnnnnnnnnnnnnnnnnnnnnnnnnnnnnnnnnnnnnnnnnnnnnnnnnnnnnnnnnnnnnnnnnnnnnnnnnnnnnnnnnnnnnnnnnnnnnnnnnnnnnnnnnnnnnnnnnnnnnnnnnnnnnnnnnnnnnnnnnnnnnnnnnnnnnnnnnnnnnnnnnnnnnnnnnnnnnnnnnnnnnnnnnnnnnnnnnnnnnnnnnnnnnnnnnnnnnnnnnnnnnnnnnnnnnnnnnnnnnnnnnnnnnnnnnnnnnnnnnnnnnnnnnnnnnnnnnnnnnnnnnnnnnnnnnnnnnnnnnnnnnnnnnnnnnnnnnnnnnnnnnnnnnnnnnnnnnnnnnnnnnnnnnnnnnnnnnnnnnnnnnnnnnnnnnnnnnnnnnnnnnnnnnnnnnnnnnnnnnnnnnnnnnnnnnnnnnnnnnnnnnnnnnnnnnnnnnnnnnnnnnnnnnnnnnnnnnnnnnnnnnnnnnnnnnnnnnnnnnnnnnnnnnnnnnnnnnnnnnnnnnnnnnnnnnnnnnnnnnnnnnnnnnnnnnnnnnnnnnnnnnnnnnnnnnnnnnnnnnnnnnnnnnnnnnnnnnnnnnnnnnnnnnnnnnnnnnnnnnnnnnnnnnnnnnnnnnnnnnnnnnnnnnnnnnnnnnnnnnnnnnnnnnnnnnnnnnnnnnnnnnnnnnnnnnnnnnnnnnnnnnnnnnnnnnnnnnnnnnnnnnnnnnnnnnnnnnnnnnnnnnnnnnnnnnnnnnnnnnnnnnnnnnnnnnnnnnnnnnnnnnnnnnnnnnnnnnnnnnnnnnnnnnnnnnnnnnnnnnnnnnnnnnnnnnnnnnnnnnnnnnnnnnnnnnnnnnnnnnnnnnnnnnnnnnnnnnnnnnnnnnnnnnnnnnnnnnnnnnnnnnnnnnnnnnnnnnnnnnnnnnnnnnnnnnnnnnnnnnnnnnnnnnnnnnnnnnnnnnnnnnnnnnnnnnnnnnnnnnnnnnnnnnnnnnnnnnnnnnnnnnnnnnnnnnnnnnnnnnnnnnnnnnnnnnnnnnnnnnnnnnnnnnnnnnnnnnnnnnnnnnnnnnnnnnnnnnnnnnnnnnnnnnnnnnnnnnnnnnnnnnnnnnnnnnnnnnnnnnnnnnnnnnnnnnnnnnnnnnnnnnnnnnnnnnnnnnnnnnnnnnnnnnnnnnnnnnnnnnnnnnnnnnnnnnnnnnnnnnnnnnnnnnnnnnnnnnnnnnnnnnnnnnnnnnnnnnnnnnnnnnnnnnnnnnnnnnnnnnnnnnnnnnnnnnnnnnnnnnnnnnnnnnnnnnnnnnnnnnnnnnnnnnnnnnnnnnnnnnnnnnnnnnnnnnnnnnnnnnnnnnnnnnnnnnnnnnnnnnnnnnnnnnnnnnnnnnnnnnnnnnnnnnnnnnnnnnnnnnnnnnnnnnnnnnnnnnnnnnnnnnnnnnnnnnnnnnnnnnnnnnnnnnnnnnnnnnnnnnnnnnnnnnnnnnnnnnnnnnnnnnnnnnnnnnnnnnnnnnnnnnnnnnnnnnnnnnnnnnnnnnnnnnnnnnnnnnnnnnnnnnnnnnnnnnnnnnnnnnnnnnnnnnnnnnnnnnnnnnnnnnnnnnnnnnnnnnnnnnnnnnnnnnnnnnnnnnnnnnnnnnnnnnnnnnnnnnnnnnnnnnnnnnnnnnnnnnnnnnnnnnnnnnnnnnnnnnnnnnnnnnnnnnnnnnnnnnnnnnnnnnnnnnnnnnnnnnnnnnnnnnnnnnnnnnnnnnnnnnnnnnnnnnnnnnnnnnnnnnnnnnnnnnnnnnnnnnnnnnnnnnnnnnnnnnnnnnnnnnnnnnnnnnnnnnnnnnnnnnnnnnnnnnnnnnnnnnnnnnnnnnnnnnnnnnnnnnnnnnnnnnnnnnnnnnnnnnnnnnnnnnnnnnnnnnnnnnnnnnnnnnnnnnnnnnnnnnnnnnnnnnnnnnnnnnnnnnnnnnnnnnnnnnnnnnnnnnnnnnnnnnnnnnnnnnnnnnnnnnnnnnnnnnnnnnnnnnnnnnnnnnnnnnnnnnnnnnnnnnnnnnnnnnnnnnnnnnnnnnnnnnnnnnnnnnnnnnnnnnnnnnnnnnnnnnnnnnnnnnnnnnnnnnnnnnnnnnnnnnnnnnnnnnnnnnnnnnnnnnnnnnnnnnnnnnnnnnnnnnnnnnnnnnnnnnnnnnnnnnnnnnnnnnnnnnnnnnnnnnnnnnnnnnnnnnnnnnnnnnnnnnnnnnnnnnnnnnnnnnnnnnnnnnnnnnnnnnnnnnnnnnnnnnnnnnnnnnnnnnnnnnnnnnnnnnnnnnnnnnnnnnnnnnnnnnnnnnnnnnnnnnnnnnnnnnnnnnnnnnnnnnnnnnnnnnnnnnnnnnnnnnnnnnnnnnnnnnnnnnnnnnnnnnnnnnnnnnnnnnnnnnnnnnnnnnnnnnnnnnnnnnnnnnnnnnnnnnnnnnnnnnnnnnnnnnnnnnnnnnnnnnnnnnnnnnnnnnnnnnnnnnnnnnnnnnnnnnnnnnnnnnnnnnnnnnnnnnnnnnnnnnnnnnnnnnnnnnnnnnnnnnnnnnnnnnnnnnnnnnnnnnnnnnnnnnnnnnnnnnnnnnnnnnnnnnnnnnnnnnnnnnnnnnnnnnnnnnnnnnnnnnnnnnnnnnnnnnnnnnnnnnnnnnnnnnnnnnnnnnnnnnnnnnnnnnnnnnnnnnnnnnnnnnnnnnnnnnnnnnnnnnnnnnnnnnnnnnnnnnnnnnnnnnnnnnnnnnnnnnnnnnnnnnnnnnnnnnnnnnnnnnnnnnnnnnnnnnnnnnnnnnnnnnnnnnnnnnnnnnnnnnnnnnnnnnnnnnnnnnnnnnnnnnnnnnnnnnnnnnnnnnnnnnnnnnnnnnnnnnnnnnnnnnnnnnnnnnnnnnnnnnnnnnnnnnnnnnnnnnnnnnnnnnnnnnnnnnnnnnnnnnnnnnnnnnnnnnnnnnnnnnnnnnnnnnnnnnnnnnnnnnnnnnnnnnnnnnnnnnnnnnnnnnnnnnnnnnnnnnnnnnnnnnnnnnnnnnnnnnnnnnnnnnnnnnnnnnnnnnnnnnnnnnnnnnnnnnnnnnnnnnnnnnnnnnnnnnnnnnnnnnnnnnnnnnnnnnnnnnnnnnnnnnnnnnnnnnnnnnnnnnnnnnnnnnnnnnnnnnnnnnnnnnnnnnnnnnnnnnnnnnnnnnnnnnnnnnnnnnnnnnnnnnnnnnnnnnnnnnnnnnnnnnnnnnnnnnnnnnnnnnnnnnnnnnnnnnnnnnnnnnnnnnnnnnnnnnnnnnnnnnnnnnnnnnnnnnnnnnnnnnnnnnnnnnnnnnnnnnnnnnnnnnnnnnnnnnnnnnnnnnnnnnnnnnnnnnnnnnnnnnnnnnnnnnnnnnnnnnnnnnnnnnnnnnnnnnnnnnnnnnnnnnnnnnnnnnnnnnnnnnnnnnnnnnnnnnnnnnnnnnnnnnnnnnnnnnnnnnnnnnnnnnnnnnnnnnnnnnnnnnnnnnnnnnnnnnnnnnnnnnnnnnnnnnnnnnnnnnnnnnnnnnnnnnnnnnnnnnnnnnnnnnnnnnnnnnnnnnnnnnnnnnnnnnnnnnnnnnnnnnnnnnnnnnnnnnnnnnnnnnnnnnnnnnnnnnnnnnnnnnnnnnnnnnnnnnnnnnnnnnnnnnnnnnnnnnnnnnnnnnnnnnnnnnnnnnnnnnnnnnnnnnnnnnnnnnnnnnnnnnnnnnnnnnnnnnnnnnnnnnnnnnnnnnnnnnnnnnnnnnnnnnnnnnnnnnnnnnnnnnnnnnnnnnnnnnnnnnnnnnnnnnnnnnnnnnnnnnnnnnnnnnnnnnnnnnnnnnnnnnnnnnnnnnnnnnnnnnnnnnnnnnnnnnnnnnnnnnnnnnnnnnnnnnnnnnnnnnnnnnnnnnnnnnnnnnnnnnnnnnnnnnnnnnnnnnnnnnnnnnnnnnnnnnnnnnnnnnnnnnnnnnnnnnnnnnnnnnnnnnnnnnnnnnnnnnnnnnnnnnnnnnnnnnnnnnnnnnnnnnnnnnnnnnnnnnnnnnnnnnnnnnnnnnnnnnnnnnnnnnnnnnnnnnnnnnnnnnnnnnnnnnnnnnnnnnnnnnnnnnnnnnnnnnnnnnnnnnnnnnnnnnnnnnnnnnnnnnnnnnnnnnnnnnnnnnnnnnnnnnnnnnnnnnnnnnnnnnnnnnnnnnnnnnnnnnnnnnnnnnnnnnnnnnnnnnnnnnnnnnnnnnnnnnnnnnnnnnnnnnnnnnnnnnnnnnnnnnnnnnnnnnnnnnnnnnnnnnnnnnnnnnnnnnnnnnnnnnnnnnnnnnnnnnnnnnnnnnnnnnnnnnnnnnnnnnnnnnnnnnnnnnnnnnnnnnnnnnnnnnnnnnnnnnnnnnnnnnnnnnnnnnnnnnnnnnnnnnnnnnnnnnnnnnnnnnnnnnnnnnnnnnnnnnnnnnnnnnnnnnnnnnnnnnnnnnnnnnnnnnnnnnnnnnnnnnnnnnnnnnnnnnnnnnnnnnnnnnnnnnnnnnnnnnnnnnnnnnnnnnnnnnnnnnnnnnnnnnnnnnnnnnnnnnnnnnnnnnnnnnnnnnnnnnnnnnnnnnnnnnnnnnnnnnnnnnnnnnnnnnnnnnnnnnnnnnnnnnnnnnnnnnnnnnnnnnnnnnnnnnnnnnnnnnnnnnnnnnnnnnnnnnnnnnnnnnnnnnnnnnnnnnnnnnnnnnnnnnnnnnnnnnnnnnnnnnnnnnnnnnnnnnnnnnnnnnnnnnnnnnnnnnnnnnnnnnnnnnnnnnnnnnnnnnnnnnnnnnnnnnnnnnnnnnnnnnnnnnnnnnnnnnnnnnnnnnnnnnnnnnnnnnnnnnnnnnnnnnnnnnnnnnnnnnnnnnnnnnnnnnnnnnnnnnnnnnnnnnnnnnnnnnnnnnnnnnnnnnnnnnnnnnnnnnnnnnnnnnnnnnnnnnnnnnnnnnnnnnnnnnnnnnnnnnnnnnnnnnnnnnnnnnnnnnnnnnnnnnnnnnnnnnnnnnnnnnnnnnnnnnnnnnnnnnnnnnnnnnnnnnnnnnnnnnnnnnnnnnnnnnnnnnnnnnnnnnnnnnnnnnnnnnnnnnnnnnnnnnnnnnnnnnnnnnnnnnnnnnnnnnnnnnnnnnnnnnnnnnnnnnnnnnnnnnnnnnnnnnnnnnnnnnnnnnnnnnnnnnnnnnnnnnnnnnnnnnnnnnnnnnnnnnnnnnnnnnnnnnnnnnnnnnnnnnnnnnnnnnnnnnnnnnnnnnnnnnnnnnnnnnnnnnnnnnnnnnnnnnnnnnnnnnnnnnnnnnnnnnnnnnnnnnnnnnnnnnnnnnnnnnnnnnnnnnnnnnnnnnnnnnnnnnnnnnnnnnnnnnnnnnnnnnnnnnnnnnnnnnnnnnnnnnnnnnnnnnnnnnnnnnnnnnnnnnnnnnnnnnnnnnnnnnnnnnnnnnnnnnnnnnnnnnnnnnnnnnnnnnnnnnnnnnnnnnnnnnnnnnnnnnnnnnnnnnnnnnnnnnnnnnnnnnnnnnnnnnnnnnnnnnnnnnnnnnnnnnnnnnnnnnnnnnnnnnnnnnnnnnnnnnnnnnnnnnnnnnnnnnnnnnnnnnnnnnnnnnnnnnnnnnnnnnnnnnnnnnnnnnnnnnnnnnnnnnnnnnnnnnnnnnnnnnnnnnnnnnnnnnnnnnnnnnnnnnnnnnnnnnnnnnnnnnnnnnnnnnnnnnnnnnnnnnnnnnnnnnnnnnnnnnnnnnnnnnnnnnnnnnnnnnnnnnnnnnnnnnnnnnnnnnnnnnnnnnnnnnnnnnnnnnnnnnnnnnnnnnnnnnnnnnnnnnnnnnnnnnnnnnnnnnnnnnnnnnnnnnnnnnnnnnnnnnnnnnnnnnnnnnnnnnnnnnnnnnnnnnnnnnnnnnnnnnnnnnnnnnnnnnnnnnnnnnnnnnnnnnnnnnnnnnnnnnnnnnnnnnnnnnnnnnnnnnnnnnnnnnnnnnnnnnnnnnnnnnnnnnnnnnnnnnnnnnnnnnnnnnnnnnnnnnnnnnnnnnnnnnnnnnnnnnnnnnnnnnnnnnnnnnnnnnnnnnnnnnnnnnnnnnnnnnnnnnnnnnnnnnnnnnnnnnnnnnnnnnnnnnnnnnnnnnnnnnnnnnnnnnnnnnnnnnnnnnnnnnnnnnnnnnnnnnnnnnnnnnnnnnnnnnnnnnnnnnnnnnnnnnnnnnnnnnnnnnnnnnnnnnnnnnnnnnnnnnnnnnnnnnnnnnnnnnnnnnnnnnnnnnnnnnnnnnnnnnnnnnnnnnnnnnnnnnnnnnnnnnnnnnnnnnnnnnnnnnnnnnnnnnnnnnnnnnnnnnnnnnnnnnnnnnnnnnnnnnnnnnnnnnnnnnnnnnnnnnnnnnnnnnnnnnnnnnnnnnnnnnnnnnnnnnnnnnnnnnnnnnnnnnnnnnnnnnnnnnnnnnnnnnnnnnnnnnnnnnnnnnnnnnnnnnnnnnnnnnnnnnnnnnnnnnnnnnnnnnnnnnnnnnnnnnnnnnnnnnnnnnnnnnnnnnnnnnnnnnnnnnnnnnnnnnnnnnnnnnnnnnnnnnnnnnnnnnnnnnnnnnnnnnnnnnnnnnnnnnnnnnnnnnnnnnnnnnnnnnnnnnnnnnnnnnnnnnnnnnnnnnnnnnnnnnnnnnnnnnnnnnnnnnnnnnnnnnnnnnnnnnnnnnnnnnnnnnnnnnnnnnnnnnnnnnnnnnnnnnnnnnnnnnnnnnnnnnnnnnnnnnnnnnnnnnnnnnnnnnnnnnnnnnnnnnnnnnnnnnnnnnnnnnnnnnnnnnnnnnnnnnnnnnnnnnnnnnnnnnnnnnnnnnnnnnnnnnnnnnnnnnnnnnnnnnnnnnnnnnnnnnnnnnnnnnnnnnnnnnnnnnnnnnnnnnnnnnnnnnnnnnnnnnnnnnnnnnnnnnnnnnnnnnnnnnnnnnnnnnnnnnnnnnnnnnnnnnnnnnnnnnnnnnnnnnnnnnnnnnnnnnnnnnnnnnnnnnnnnnnnnnnnnnnnnnnnnnnnnnnnnnnnnnnnnnnnnnnnnnnnnnnnnnnnnnnnnnnnnnnnnnnnnnnnnnnnnnnnnnnnnnnnnnnnnnnnnnnnnnnnnnnnnnnnnnnnnnnnnnnnnnnnnnnnnnnnnnnnnnnnnnnnnnnnnnnnnnnnnnnnnnnnnnnnnnnnnnnnnnnnnnnnnnnnnnnnnnnnnnnnnnnnnnnnnnnnnnnnnnnnnnnnnnnnnnnnnnnnnnnnnnnnnnnnnnnnnnnnnnnnnnnnnnnnnnnnnnnnnnnnnnnnnnnnnnnnnnnnnnnnnnnnnnnnnnnnnnnnnnnnnnnnnnnnnnnnnnnnnnnnnnnnnnnnnnnnnnnnnnnnnnnnnnnnnnnnnnnnnnnnnnnnnnnnnnnnnnnnnnnnnnnnnnnnnnnnnnnnnnnnnnnnnnnnnnnnnnnnnnnnnnnnnnnnnnnnnnnnnnnnnnnnnnnnnnnnnnnnnnnnnnnnnnnnnnnnnnnnnnnnnnnnnnnnnnnnnnnnnnnnnnnnnnnnnnnnnnnnnnnnnnnnnnnnnnnnnnnnnnnnnnnnnnnnnnnnnnnnnnnnnnnnnnnnnnnnnnnnnnnnnnnnnnnnnnnnnnnnnnnnnnnnnnnnnnnnnnnnnnnnnnnnnnnnnnnnnnnnnnnnnnnnnnnnnnnnnnnnnnnnnnnnnnnnnnnnnnnnnnnnnnnnnnnnnnnnnnnnnnnnnnnnnnnnnnnnnnnnnnnnnnnnnnnnnnnnnnnnnnnnnnnnnnnnnnnnnnnnnnnnnnnnnnnnnnnnnnnnnnnnnnnnnnnnnnnnnnnnnnnnnnnnnnnnnnnnnnnnnnnnnnnnnnnnnnnnnnnnnnnnnnnnnnnnnnnnnnnnnnnnnnnnnnnnnnnnnnnnnnnnnnnnnnnnnnnnnnnnnnnnnnnnnnnnnnnnnnnnnnnnnnnnnnnnnnnnnnnnnnnnnnnnnnnnnnnnnnnnnnnnnnnnnnnnnnnnnnnnnnnnnnnnnnnnnnnnnnnnnnnnnnnnnnnnnnnnnnnnnnnnnnnnnnnnnnnnnnnnnnnnnnnnnnnnnnnnnnnnnnnnnnnnnnnnnnnnnnnnnnnnnnnnnnnnnnnnnnnnnnnnnnnnnnnnnnnnnnnnnnnnnnnnnnnnnnnnnnnnnnnnnnnnnnnnnnnnnnnnnnnnnnnnnnnnnnnnnnnnnnnnnnnnnnnnnnnnnnnnnnnnnnnnnnnnnnnnnnnnnnnnnnnnnnnnnnnnnnnnnnnnnnnnnnnnnnnnnnnnnnnnnnnnnnnnnnnnnnnnnnnnnnnnnnnnnnnnnnnnnnnnnnnnnnnnnnnnnnnnnnnnnnnnnnnnnnnnnnnnnnnnnnnnnnnnnnnnnnnnnnnnnnnnnnnnnnnnnnnnnnnnnnnnnnnnnnnnnnnnnnnnnnnnnnnnnnnnnnnnnnnnnnnnnnnnnnnnnnnnnnnnnnnnnnnnnnnnnnnnnnnnnnnnnnnnnnnnnnnnnnnnnnnnnnnnnnnnnnnnnnnnnnnnnnnnnnnnnnnnnnnnnnnnnnnnnnnnnnnnnnnnnnnnnnnnnnnnnnnnnnnnnnnnnnnnnnnnnnnnnnnnnnnnnnnnnnnnnnnnnnnnnnnnnnnnnnnnnnnnnnnnnnnnnnnnnnnnnnnnnnnnnnnnnnnnnnnnnnnnnnnnnnnnnnnnnnnnnnnnnnnnnnnnnnnnnnnnnnnnnnnnnnnnnnnnnnnnnnnnnnnnnnnnnnnnnnnnnnnnnnnnnnnnnnnnnnnnnnnnnnnnnnnnnnnnnnnnnnnnnnnnnnnnnnnnnnnnnnnnnnnnnnnnnnnnnnnnnnnnnnnnnnnnnnnnnnnnnnnnnnnnnnnnnnnnnnnnnnnnnnnnnnnnnnnnnnnnnnnnnnnnnnnnnnnnnnnnnnnnnnnnnnnnnnnnnnnnnnnnnnnnnnnnnnnnnnnnnnnnnnnnnnnnnnnnnnnnnnnnnnnnnnnnnnnnnnnnnnnnnnnnnnnnnnnnnnnnnnnnnnnnnnnnnnnnnnnnnnnnnnnnnnnnnnnnnnnnnnnnnnnnnnnnnnnnnnnnnnnnnnnnnnnnnnnnnnnnnnnnnnnnnnnnnnnnnnnnnnnnnnnnnnnnnnnnnnnnnnnnnnnnnnnnnnnnnnnnnnnnnnnnnnnnnnnnnnnnnnnnnnnnnnnnnnnnnnnnnnnnnnnnnnnnnnnnnnnnnnnnnnnnnnnnnnnnnnnnnnnnnnnnnnnnnnnnnnnnnnnnnnnnnnnnnnnnnnnnnnnnnnnnnnnnnnnnnnnnnnnnnnnnnnnnnnnnnnnnnnnnnnnnnnnnnnnnnnnnnnnnnnnnnnnnnnnnnnnnnnnnnnnnnnnnnnnnnnnnnnnnnnnnnnnnnnnnnnnnnnnnnnnnnnnnnnnnnnnnnnnnnnnnnnnnnnnnnnnnnnnnnnnnnnnnnnnnnnnnnnnnnnnnnnnnnnnnnnnnnnnnnnnnnnnnnnnnnnnnnnnnnnnnnnnnnnnnnnnnnnnnnnnnnnnnnnnnnnnnnnnnnnnnnnnnnnnnnnnnnnnnnnnnnnnnnnnnnnnnnnnnnnnnnnnnnnnnnnnnnnnnnnnnnnnnnnnnnnnnnnnnnnnnnnnnnnnnnnnnnnnnnnnnnnnnnnnnnnnnnnnnnnnnnnnnnnnnnnnnnnnnnnnnnnnnnnnnnnnnnnnnnnnnnnnnnnnnnnnnnnnnnnnnnnnnnnnnnnnnnnnnnnnnnnnnnnnnnnnnnnnnnnnnnnnnnnnnnnnnnnnnnnnnnnnnnnnnnnnnnnnnnnnnnnnnnnnnnnnnnnnnnnnnnnnnnnnnnnnnnnnnnnnnnnnnnnnnnnnnnnnnnnnnnnnnnnnnnnnnnnnnnnnnnnnnnnnnnnnnnnnnnnnnnnnnnnnnnnnnnnnnnnnnnnnnnnnnnnnnnnnnnnnnnnnnnnnnnnnnnnnnnnnnnnnnnnnnnnnnnnnnnnnnnnnnnnnnnnnnnnnnnnnnnnnnnnnnnnnnnnnnnnnnnnnnnnnnnnnnnnnnnnnnnnnnnnnnnnnnnnnnnnnnnnnnnnnnnnnnnnnnnnnnnnnnnnnnnnnnnnnnnnnnnnnnnnnnnnnnnnnnnnnnnnnnnnnnnnnnnnnnnnnnnnnnnnnnnnnnnnnnnnnnnnnnnnnnnnnnnnnnnnnnnnnnnnnnnnnnnnnnnnnnnnnnnnnnnnnnnnnnnnnnnnnnnnnnnnnnnnnnnnnnnnnnnnnnnnnnnnnnnnnnnnnnnnnnnnnnnnnnnnnnnnnnnnnnnnnnnnnnnnnnnnnnnnnnnnnnnnnnnnnnnnnnnnnnnnnnnnnnnnnnnnnnnnnnnnnnnnnnnnnnnnnnnnnnnnnnnnnnnnnnnnnnnnnnnnnnnnnnnnnnnnnnnnnnnnnnnnnnnnnnnnnnnnnnnnnnnnnnnnnnnnnnnnnnnnnnnnnnnnnnnnnnnnnnnnnnnnnnnnnnnnnnnnnnnnnnnnnnnnnnnnnnnnnnnnnnnnnnnnnnnnnnnnnnnnnnnnnnnnnnnnnnnnnnnnnnnnnnnnnnnnnnnnnnnnnnnnnnnnnnnnnnnnnnnnnnnnnnnnnnnnnnnnnnnnnnnnnnnnnnnnnnnnnnnnnnnnnnnnnnnnnnnnnnnnnnnnnnnnnnnnnnnnnnnnnnnnnnnnnnnnnnnnnnnnnnnnnnnnnnnnnnnnnnnnnnnnnnnnnnnnnnnnnnnnnnnnnnnnnnnnnnnnnnnnnnnnnnnnnnnnnnnnnnnnnnnnnnnnnnnnnnnnnnnnnnnnnnnnnnnnnnnnnnnnnnnnnnnnnnnnnnnnnnnnnnnnnnnnnnnnnnnnnnnnnnnnnnnnnnnnnnnnnnnnnnnnnnnnnnnnnnnnnnnnnnnnnnnnnnnnnnnnnnnnnnnnnnnnnnnnnnnnnnnnnnnnnnnnnnnnnnnnnnnnnnnnnnnnnnnnnnnnnnnnnnnnnnnnnnnnnnnnnnnnnnnnnnnnnnnnnnnnnnnnnnnnnnnnnnnnnnnnnnnnnnnnnnnnnnnnnnnnnnnnnnnnnnnnnnnnnnnnnnnnnnnnnnnnnnnnnnnnnnnnnnnnnnnnnnnnnnnnnnnnnnnnnnnnnnnnnnnnnnnnnnnnnnnnnnnnnnnnnnnnnnnnnnnnnnnnnnnnnnnnnnnnnnnnnnnnnnnnnnnnnnnnnnnnnnnnnnnnnnnnnnnnnnnnnnnnnnnnnnnnnnnnnnnnnnnnnnnnnnnnnnnnnnnnnnnnnnnnnnnnnnnnnnnnnnnnnnnnnnnnnnnnnnnnnnnnnnnnnnnnnnnnnnnnnnnnnnnnnnnnnnnnnnnnnnnnnnnnnnnnnnnnnnnnnnnnnnnnnnnnnnnnnnnnnnnnnnnnnnnnnnnnnnnnnnnnnnnnnnnnnnnnnnnnnnnnnnnnnnnnnnnnnnnnnnnnnnnnnnnnnnnnnnnnnnnnnnnnnnnnnnnnnnnnnnnnnnnnnnnnnnnnnnnnnnnnnnnnnnnnnnnnnnnnnnnnnnnnnnnnnnnnnnnnnnnnnnnnnnnnnnnnnnnnnnnnnnnnnnnnnnnnnnnnnnnnnnnnnnnnnnnnnnnnnnnnnnnnnnnnnnnnnnnnnnnnnnnnnnnnnnnnnnnnnnnnnnnnnnnnnnnnnnnnnnnnnnnnnnnnnnnnnnnnnnnnnnnnnnnnnnnnnnnnnnnnnnnnnnnnnnnnnnnnnnnnnnnnnnnnnnnnnnnnnnnnnnnnnnnnnnnnnnnnnnnnnnnnnnnnnnnnnnnnnnnnnnnnnnnnnnnnnnnnnnnnnnnnnnnnnnnnnnnnnnnnnnnnnnnnnnnnnnnnnnnnnnnnnnnnnnnnnnnnnnnnnnnnnnnnnnnnnnnnnnnnnnnnnnnnnnnnnnnnnnnnnnnnnnnnnnnnnnnnnnnnnnnnnnnnnnnnnnnnnnnnnnnnnnnnnnnnnnnnnnnnnnnnnnnnnnnnnnnnnnnnnnnnnnnnnnnnnnnnnnnnnnnnnnnnnnnnnnnnnnnnnnnnnnnnnnnnnnnnnnnnnnnnnnnnnnnnnnnnnnnnnnnnnnnnnnnnnnnnnnnnnnnnnnnnnnnnnnnnnnnnnnnnnnnnnnnnnnnnnnnnnnnnnnnnnnnnnnnnnnnnnnnnnnnnnnnnnnnnnnnnnnnnnnnnnnnnnnnnnnnnnnnnnnnnnnnnnnnnnnnnnnnnnnnnnnnnnnnnnnnnnnnnnnnnnnnnnnnnnnnnnnnnnnnnnnnnnnnnnnnnnnnnnnnnnnnnnnnnnnnnnnnnnnnnnnnnnnnnnnnnnnnnnnnnnnnnnnnnnnnnnnnnnnnnnnnnnnnnnnnnnnnnnnnnnnnnnnnnnnnnnnnnnnnnnnnnnnnnnnnnnnnnnnnnnnnnnnnnnnnnnnnnnnnnnnnnnnnnnnnnnnnnnnnnnnnnnnnnnnnnnnnnnnnnnnnnnnnnnnnnnnnnnnnnnnnnnnnnnnnnnnnnnnnnnnnnnnnnnnnnnnnnnnnnnnnnnnnnnnnnnnnnnnnnnnnnnnnnnnnnnnnnnnnnnnnnnnnnnnnnnnnnnnnnnnnnnnnnnnnnnnnnnnnnnnnnnnnnnnnnnnnnnnnnnnnnnnnnnnnnnnnnnnnnnnnnnnnnnnnnnnnnnnnnnnnnnnnnnnnnnnnnnnnnnnnnnnnnnnnnnnnnnnnnnnnnnnnnnnnnnnnnnnnnnnnnnnnnnnnnnnnnnnnnnnnnnnnnnnnnnnnnnnnnnnnnnnnnnnnnnnnnnnnnnnnnnnnnnnnnnnnnnnnnnnnnnnnnnnnnnnnnnnnnnnnnnnnnnnnnnnnnnnnnnnnnnnnnnnnnnnnnnnnnnnnnnnnnnnnnnnnnnnnnnnnnnnnnnnnnnnnnnnnnnnnnnnnnnnnnnnnnnnnnnnnnnnnnnnnnnnnnnnnnnnnnnnnnnnnnnnnnnnnnnnnnnnnnnnnnnnnnnnnnnnnnnnnnnnnnnnnnnnnnnnnnnnnnnnnnnnnnnnnnnnnnnnnnnnnnnnnnnnnnnnnnnnnnnnnnnnnnnnnnnnnnnnnnnnnnnnnnnnnnnnnnnnnnnnnnnnnnnnnnnnnnnnnnnnnnnnnnnnnnnnnnnnnnnnnnnnnnnnnnnnnnnnnnnnnnnnnnnnnnnnnnnnnnnnnnnnnnnnnnnnnnnnnnnnnnnnnnnnnnnnnnnnnnnnnnnnnnnnnnnnnnnnnnnnnnnnnnnnnnnnnnnnnnnnnnnnnnnnnnnnnnnnnnnnnnnnnnnnnnnnnnnnnnnnnnnnnnnnnnnnnnnnnnnnnnnnnnnnnnnnnnnnnnnnnnnnnnnnnnnnnnnnnnnnnnnnnnnnnnnnnnnnnnnnnnnnnnnnnnnnnnnnnnnnnnnnnnnnnnnnnnnnnnnnnnnnnnnnnnnnnnnnnnnnnnnnnnnnnnnnnnnnnnnnnnnnnnnnnnnnnnnnnnnnnnnnnnnnnnnnnnnnnnnnnnnnnnnnnnnnnnnnnnnnnnnnnnnnnnnnnnnnnnnnnnnnnnnnnnnnnnnnnnnnnnnnnnnnnnnnnnnnnnnnnnnnnnnnnnnnnnnnnnnnnnnnnnnnnnnnnnnnnnnnnnnnnnnnnnnnnnnnnnnnnnnnnnnnnnnnnnnnnnnnnnnnnnnnnnnnnnnnnnnnnnnnnnnnnnnnnnnnnnnnnnnnnnnnnnnnnnnnnnnnnnnnnnnnnnnnnnnnnnnnnnnnnnnnnnnnnnnnnnnnnnnnnnnnnnnnnnnnnnnnnnnnnnnnnnnnnnnnnnnnnnnnnnnnnnnnnnnnnnnnnnnnnnnnnnnnnnnnnnnnnnnnnnnnnnnnnnnnnnnnnnnnnnnnnnnnnnnnnnnnnnnnnnnnnnnnnnnnnnnnnnnnnnnnnnnnnnnnnnnnnnnnnnnnnnnnnnnnnnnnnnnnnnnnnnnnnnnnnnnnnnnnnnnnnnnnnnnnnnnnnnnnnnnnnnnnnnnnnnnnnnnnnnnnnnnnnnnnnnnnnnnnnnnnnnnnnnnnnnnnnnnnnnnnnnnnnnnnnnnnnnnnnnnnnnnnnnnnnnnnnnnnnnnnnnnnnnnnnnnnnnnnnnnnnnnnnnnnnnnnnnnnnnnnnnnnnnnnnnnnnnnnnnnnnnnnnnnnnnnnnnnnnnnnnnnnnnnnnnnnnnnnnnnnnnnnnnnnnnnnnnnnnnnnnnnnnnnnnnnnnnnnnnnnnnnnnnnnnnnnnnnnnnnnnnnnnnnnnnnnnnnnnnnnnnnnnnnnnnnnnnnnnnnnnnnnnnnnnnnnnnnnnnnnnnnnnnnnnnnnnnnnnnnnnnnnnnnnnnnnnnnnnnnnnnnnnnnnnnnnnnnnnnnnnnnnnnnnnnnnnnnnnnnnnnnnnnnnnnnnnnnnnnnnnnnnnnnnnnnnnnnnnnnnnnnnnnnnnnnnnnnnnnnnnnnnnnnnnnnnnnnnnnnnnnnnnnnnnnnnnnnnnnnnnnnnnnnnnnnnnnnnnnnnnnnnnnnnnnnnnnnnnnnnnnnnnnnnnnnnnnnnnnnnnnnnnnnnnnnnnnnnnnnnnnnnnnnnnnnnnnnnnnnnnnnnnnnnnnnnnnnnnnnnnnnnnnnnnnnnnnnnnnnnnnnnnnnnnnnnnnnnnnnnnnnnnnnnnnnnnnnnnnnnnnnnnnnnnnnnnnnnnnnnnnnnnnnnnnnnnnnnnnnnnnnnnnnnnnnnnnnnnnnnnnnnnnnnnnnnnnnnnnnnnnnnnnnnnnnnnnnnnnnnnnnnnnnnnnnnnnnnnnnnnnnnnnnnnnnnnnnnnnnnnnnnnnnnnnnnnnnnnnnnnnnnnnnnnnnnnnnnnnnnnnnnnnnnnnnnnnnnnnnnnnnnnnnnnnnnnnnnnnnnnnnnnnnnnnnnnnnnnnnnnnnnnnnnnnnnnnnnnnnnnnnnnnnnnnnnnnnnnnnnnnnnnnnnnnnnnnnnnnnnnnnnnnnnnnnnnnnnnnnnnnnnnnnnnnnnnnnnnnnnnnnnnnnnnnnnnnnnnnnnnnnnnnnnnnnnnnnnnnnnnnnnnnnnnnnnnnnnnnnnnnnnnnnnnnnnnnnnnnnnnnnnnnnnnnnnnnnnnnnnnnnnnnnnnnnnnnnnnnnnnnnnnnnnnnnnnnnnnnnnnnnnnnnnnnnnnnnnnnnnnnnnnnnnnnnnnnnnnnnnnnnnnnnnnnnnnnnnnnnnnnnnnnnnnnnnnnnnnnnnnnnnnnnnnnnnnnnnnnnnnnnnnnnnnnnnnnnnnnnnnnnnnnnnnnnnnnnnnnnnnnnnnnnnnnnnnnnnnnnnnnnnnnnnnnnnnnnnnnnnnnnnnnnnnnnnnnnnnnnnnnnnnnnnnnnnnnnnnnnnnnnnnnnnnnnnnnnnnnnnnnnnnnnnnnnnnnnnnnnnnnnnnnnnnnnnnnnnnnnnnnnnnnnnnnnnnnnnnnnnnnnnnnnnnnnnnnnnnnnnnnnnnnnnnnnnnnnnnnnnnnnnnnnnnnnnnnnnnnnnnnnnnnnnnnnnnnnnnnnnnnnnnnnnnnnnnnnnnnnnnnnnnnnnnnnnnnnnnnnnnnnnnnnnnnnnnnnnnnnnnnnnnnnnnnnnnnnnnnnnnnnnnnnnnnnnnnnnnnnnnnnnnnnnnnnnnnnnnnnnnnnnnnnnnnnnnnnnnnnnnnnnnnnnnnnnnnnnnnnnnnnnnnnnnnnnnnnnnnnnnnnnnnnnnnnnnnnnnnnnnnnnnnnnnnnnnnnnnnnnnnnnnnnnnnnnnnnnnnnnnnnnnnnnnnnnnnnnnnnnnnnnnnnnnnnnnnnnnnnnnnnnnnnnnnnnnnnnnnnnnnnnnnnnnnnnnnnnnnnnnnnnnnnnnnnnnnnnnnnnnnnnnnnnnnnnnnnnnnnnnnnnnnnnnnnnnnnnnnnnnnnnnnnnnnnnnnnnnnnnnnnnnnnnnnnnnnnnnnnnnnnnnnnnnnnnnnnnnnnnnnnnnnnnnnnnnnnnnnnnnnnnnnnnnnnnnnnnnnnnnnnnnnnnnnnnnnnnnnnnnnnnnnnnnnnnnnnnnnnnnnnnnnnnnnnnnnnnnnnnnnnnnnnnnnnnnnnnnnnnnnnnnnnnnnnnnnnnnnnnnnnnnnnnnnnnnnnnnnnnnnnnnnnnnnnnnnnnnnnnnnnnnnnnnnnnnnnnnnnnnnnnnnnnnnnnnnnnnnnnnnnnnnnnnnnnnnnnnnnnnnnnnnnnnnnnnnnnnnnnnnnnnnnnnnnnnnnnnnnnnnnnnnnnnnnnnnnnnnnnnnnnnnnnnnnnnnnnnnnnnnnnnnnnnnnnnnnnnnnnnnnnnnnnnnnnnnnnnnnnnnnnnnnnnnnnnnnnnnnnnnnnnnnnnnnnnnnnnnnnnnnnnnnnnnnnnnnnnnnnnnnnnnnnnnnnnnnnnnnnnnnnnnnnnnnnnnnnnnnnnnnnnnnnnnnnnnnnnnnnnnnnnnnnnnnnnnnnnnnnnnnnnnnnnnnnnnnnnnnnnnnnnnnnnnnnnnnnnnnnnnnnnnnnnnnnnnnnnnnnnnnnnnnnnnnnnnnnnnnnnnnnnnnnnnnnnnnnnnnnnnnnnnnnnnnnnnnnnnnnnnnnnnnnnnnnnnnnnnnnnnnnnnnnnnnnnnnnnnnnnnnnnnnnnnnnnnnnnnnnnnnnnnnnnnnnnnnnnnnnnnnnnnnnnnnnnnnnnnnnnnnnnnnnnnnnnnnnnnnnnnnnnnnnnnnnnnnnnnnnnnnnnnnnnnnnnnnnnnnnnnnnnnnnnnnnnnnnnnnnnnnnnnnnnnnnnnnnnnnnnnnnnnnnnnnnnnnnnnnnnnnnnnnnnnnnnnnnnnnnnnnnnnnnnnnnnnnnnnnnnnnnnnnnnnnnnnnnnnnnnnnnnnnnnnnnnnnnnnnnnnnnnnnnnnnnnnnnnnnnnnnnnnnnnnnnnnnnnnnnnnnnnnnnnnnnnnnnnnnnnnnnnnnnnnnnnnnnnnnnnnnnnnnnnnnnnnnnnnnnnnnnnnnnnnnnnnnnnnnnnnnnnnnnnnnnnnnnnnnnnnnnnnnnnnnnnnnnnnnnnnnnnnnnnnnnnnnnnnnnnnnnnnnnnnnnnnnnnnnnnnnnnnnnnnnnnnnnnnnnnnnnnnnnnnnnnnnnnnnnnnnnnnnnnnnnnnnnnnnnnnnnnnnnnnnnnnnnnnnnnnnnnnnnnnnnnnnnnnnnnnnnnnnnnnnnnnnnnnnnnnnnnnnnnnnnnnnnnnnnnnnnnnnnnnnnnnnnnnnnnnnnnnnnnnnnnnnnnnnnnnnnnnnnnnnnnnnnnnnnnnnnnnnnnnnnnnnnnnnnnnnnnnnnnnnnnnnnnnnnnnnnnnnnnnnnnnnnnnnnnnnnnnnnnnnnnnnnnnnnnnnnnnnnnnnnnnnnnnnnnnnnnnnnnnnnnnnnnnnnnnnnnnnnnnnnnnnnnnnnnnnnnnnnnnnnnnnnnnnnnnnnnnnnnnnnnnnnnnnnnnnnnnnnnnnnnnnnnnnnnnnnnnnnnnnnnnnnnnnnnnnnnnnnnnnnnnnnnnnnnnnnnnnnnnnnnnnnnnnnnnnnnnnnnnnnnnnnnnnnnnnnnnnnnnnnnnnnnnnnnnnnnnnnnnnnnnnnnnnnnnnnnnnnnnnnnnnnnnnnnnnnnnnnnnnnnnnnnnnnnnnnnnnnnnnnnnnnnnnnnnnnnnnnnnnnnnnnnnnnnnnnnnnnnnnnnnnnnnnnnnnnnnnnnnnnnnnnnnnnnnnnnnnnnnnnnnnnnnnnnnnnnnnnnnnnnnnnnnnnnnnnnnnnnnnnnnnnnnnnnnnnnnnnnnnnnnnnnnnnnnnnnnnnnnnnnnnnnnnnnnnnnnnnnnnnnnnnnnnnnnnnnnnnnnnnnnnnnnnnnnnnnnnnnnnnnnnnnnnnnnnnnnnnnnnnnnnnnnnnnnnnnnnnnnnnnnnnnnnnnnnnnnnnnnnnnnnnnnnnnnnnnnnnnnnnnnnnnnnnnnnnnnnnnnnnnnnnnnnnnnnnnnnnnnnnnnnnnnnnnnnnnnnnnnnnnnnnnnnnnnnnnnnnnnnnnnnnnnnnnnnnnnnnnnnnnnnnnnnnnnnnnnnnnnnnnnnnnnnnnnnnnnnnnnnnnnnnnnnnnnnnnnnnnnnnnnnnnnnnnnnnnnnnnnnnnnnnnnnnnnnnnnnnnnnnnnnnnnnnnnnnnnnnnnnnnnnnnnnnnnnnnnnnnnnnnnnnnnnnnnnnnnnnnnnnnnnnnnnnnnnnnnnnnnnnnnnnnnnnnnnnnnnnnnnnnnnnnnnnnnnnnnnnnnnnnnnnnnnnnnnnnnnnnnnnnnnnnnnnnnnnnnnnnnnnnnnnnnnnnnnnnnnnnnnnnnnnnnnnnnnnnnnnnnnnnnnnnnnnnnnnnnnnnnnnnnnnnnnnnnnnnnnnnnnnnnnnnnnnnnnnnnnnnnnnnnnnnnnnnnnnnnnnnnnnnnnnnnnnnnnnnnnnnnnnnnnnnnnnnnnnnnnnnnnnnnnnnnnnnnnnnnnnnnnnnnnnnnnnnnnnnnnnnnnnnnnnnnnnnnnnnnnnnnnnnnnnnnnnnnnnnnnnnnnnnnnnnnnnnnnnnnnnnnnnnnnnnnnnnnnnnnnnnnnnnnnnnnnnnnnnnnnnnnnnnnnnnnnnnnnnnnnnnnnnnnnnnnnnnnnnnnnnnnnnnnnnnnnnnnnnnnnnnnnnnnnnnnnnnnnnnnnnnnnnnnnnnnnnnnnnnnnnnnnnnnnnnnnnnnnnnnnnnnnnnnnnnnnnnnnnnnnnnnnnnnnnnnnnnnnnnnnnnnnnnnnnnnnnnnnnnnnnnnnnnnnnnnnnnnnnnnnnnnnnnnnnnnnnnnnnnnnnnnnnnnnnnnnnnnnnnnnnnnnnnnnnnnnnnnnnnnnnnnnnnnnnnnnnnnnnnnnnnnnnnnnnnnnnnnnnnnnnnnnnnnnnnnnnnnnnnnnnnnnnnnnnnnnnnnnnnnnnnnnnnnnnnnnnnnnnnnnnnnnnnnnnnnnnnnnnnnnnnnnnnnnnnnnnnnnnnnnnnnnnnnnnnnnnnnnnnnnnnnnnnnnnnnnnnnnnnnnnnnnnnnnnnnnnnnnnnnnnnnnnnnnnnnnnnnnnnnnnnnnnnnnnnnnnnnnnnnnnnnnnnnnnnnnnnnnnnnnnnnnnnnnnnnnnnnnnnnnnnnnnnnnnnnnnnnnnnnnnnnnnnnnnnnnnnnnnnnnnnnnnnnnnnnnnnnnnnnnnnnnnnnnnnnnnnnnnnnnnnnnnnnnnnnnnnnnnnnnnnnnnnnnnnnnnnnnnnnnnnnnnnnnnnnnnnnnnnnnnnnnnnnnnnnnnnnnnnnnnnnnnnnnnnnnnnnnnnnnnnnnnnnnnnnnnnnnnnnnnnnnnnnnnnnnnnnnnnnnnnnnnnnnnnnnnnnnnnnnnnnnnnnnnnnnnnnnnnnnnnnnnnnnnnnnnnnnnnnnnnnnnnnnnnnnnnnnnnnnnnnnnnnnnnnnnnnnnnnnnnnnnnnnnnnnnnnnnnnnnnnnnnnnnnnnnnnnnnnnnnnnnnnnnnnnnnnnnnnnnnnnnnnnnnnnnnnnnnnnnnnnnnnnnnnnnnnnnnnnnnnnnnnnnnnnnnnnnnnnnnnnnnnnnnnnnnnnnnnnnnnnnnnnnnnnnnnnnnnnnnnnnnnnnnnnnnnnnnnnnnnnnnnnnnnnnnnnnnnnnnnnnnnnnnnnnnnnnnnnnnnnnnnnnnnnnnnnnnnnnnnnnnnnnnnnnnnnnnnnnnnnnnnnnnnnnnnnnnnnnnnnnnnnnnnnnnnnnnnnnnnnnnnnnnnnnnnnnnnnnnnnnnnnnnnnnnnnnnnnnnnnnnnnnnnnnnnnnnnnnnnnnnnnnnnnnnnnnnnnnnnnnnnnnnnnnnnnnnnnnnnnnnnnnnnnnnnnnnnnnnnnnnnnnnnnnnnnnnnnnnnnnnnnnnnnnnnnnnnnnnnnnnnnnnnnnnnnnnnnnnnnnnnnnnnnnnnnnnnnnnnnnnnnnnnnnnnnnnnnnnnnnnnnnnnnnnnnnnnnnnnnnnnnnnnnnnnnnnnnnnnnnnnnnnnnnnnnnnnnnnnnnnnnnnnnnnnnnnnnnnnnnnnnnnnnnnnnnnnnnnnnnnnnnnnnnnnnnnnnnnnnnnnnnnnnnnnnnnnnnnnnnnnnnnnnnnnnnnnnnnnnnnnnnnnnnnnnnnnnnnnnnnnnnnnnnnnnnnnnnnnnnnnnnnnnnnnnnnnnnnnnnnnnnnnnnnnnnnnnnnnnnnnnnnnnnnnnnnnnnnnnnnnnnnnnnnnnnnnnnnnnnnnnnnnnnnnnnnnnnnnnnnnnnnnnnnnnnnnnnnnnnnnnnnnnnnnnnnnnnnnnnnnnnnnnnnnnnnnnnnnnnnnnnnnnnnnnnnnnnnnnnnnnnnnnnnnnnnnnnnnnnnnnnnnnnnnnnnnnnnnnnnnnnnnnnnnnnnnnnnnnnnnnnnnnnnnnnnnnnnnnnnnnnnnnnnnnnnnnnnnnnnnnnnnnnnnnnnnnnnnnnnnnnnnnnnnnnnnnnnnnnnnnnnnnnnnnnnnnnnnnnnnnnnnnnnnnnnnnnnnnnnnnnnnnnnnnnnnnnnnnnnnnnnnnnnnnnnnnnnnnnnnnnnnnnnnnnnnnnnnnnnnnnnnnnnnnnnnnnnnnnnnnnnnnnnnnnnnnnnnnnnnnnnnnnnnnnnnnnnnnnnnnnnnnnnnnnnnnnnnnnnnnnnnnnnnnnnnnnnnnnnnnnnnnnnnnnnnnnnnnnnnnnnnnnnnnnnnnnnnnnnnnnnnnnnnnnnnnnnnnnnnnnnnnnnnnnnnnnnnnnnnnnnnnnnnnnnnnnnnnnnnnnnnnnnnnnnnnnnnnnnnnnnnnnnnnnnnnnnnnnnnnnnnnnnnnnnnnnnnnnnnnnnnnnnnnnnnnnnnnnnnnnnnnnnnnnnnnnnnnnnnnnnnnnnnnnnnnnnnnnnnnnnnnnnnnnnnnnnnnnnnnnnnnnnnnnnnnnnnnnnnnnnnnnnnnnnnnnnnnnnnnnnnnnnnnnnnnnnnnnnnnnnnnnnnnnnnnnnnnnnnnnnnnnnnnnnnnnnnnnnnnnnnnnnnnnnnnnnnnnnnnnnnnnnnnnnnnnnnnnnnnnnnnnnnnnnnnnnnnnnnnnnnnnnnnnnnnnnnnnnnnnnnnnnnnnnnnnnnnnnnnnnnnnnnnnnnnnnnnnnnnnnnnnnnnnnnnnnnnnnnnnnnnnnnnnnnnnnnnnnnnnnnnnnnnnnnnnnnnnnnnnnnnnnnnnnnnnnnnnnnnnnnnnnnnnnnnnnnnnnnnnnnnnnnnnnnnnnnnnnnnnnnnnnnnnnnnnnnnnnnnnnnnnnnnnnnnnnnnnnnnnnnnnnnnnnnnnnnnnnnnnnnnnnnnnnnnnnnnnnnnnnnnnnnnnnnnnnnnnnnnnnnnnnnnnnnnnnnnnnnnnnnnnnnnnnnnnnnnnnnnnnnnnnnnnnnnnnnnnnnnnnnnnnnnnnnnnnnnnnnnnnnnnnnnnnnnnnnnnnnnnnnnnnnnnnnnnnnnnnnnnnnnnnnnnnnnnnnnnnnnnnnnnnnnnnnnnnnnnnnnnnnnnnnnnnnnnnnnnnnnnnnnnnnnnnnnnnnnnnnnnnnnnnnnnnnnnnnnnnnnnnnnnnnnnnnnnnnnnnnnnnnnnnnnnnnnnnnnnnnnnnnnnnnnnnnnnnnnnnnnnnnnnnnnnnnnnnnnnnnnnnnnnnnnnnnnnnnnnnnnnnnnnnnnnnnnnnnnnnnnnnnnnnnnnnnnnnnnnnnnnnnnnnnnnnnnnnnnnnnnnnnnnnnnnnnnnnnnnnnnnnnnnnnnnnnnnnnnnnnnnnnnnnnnnnnnnnnnnnnnnnnnnnnnnnnnnnnnnnnnnnnnnnnnnnnnnnnnnnnnnnnnnnnnnnnnnnnnnnnnnnnnnnnnnnnnnnnnnnnnnnnnnnnnnnnnnnnnnnnnnnnnnnnnnnnnnnnnnnnnnnnnnnnnnnnnnnnnnnnnnnnnnnnnnnnnnnnnnnnnnnnnnnnnnnnnnnnnnnnnnnnnnnnnnnnnnnnnnnnnnnnnnnnnnnnnnnnnnnnnnnnnnnnnnnnnnnnnnnnnnnnnnnnnnnnnnnnnnnnnnnnnnnnnnnnnnnnnnnnnnnnnnnnnnnnnnnnnnnnnnnnnnnnnnnnnnnnnnnnnnnnnnnnnnnnnnnnnnnnnnnnnnnnnnnnnnnnnnnnnnnnnnnnnnnnnnnnnnnnnnnnnnnnnnnnnnnnnnnnnnnnnnnnnnnnnnnnnnnnnnnnnnnnnnnnnnnnnnnnnnnnnnnnnnnnnnnnnnnnnnnnnnnnnnnnnnnnnnnnnnnnnnnnnnnnnnnnnnnnnnnnnnnnnnnnnnnnnnnnnnnnnnnnnnnnnnnnnnnnnnnnnnnnnnnnnnnnnnnnnnnnnnnnnnnnnnnnnnnnnnnnnnnnnnnnnnnnnnnnnnnnnnnnnnnnnnnnnnnnnnnnnnnnnnnnnnnnnnnnnnnnnnnnnnnnnnnnnnnnnnnnnnnnnnnnnnnnnnnnnnnnnnnnnnnnnnnnnnnnnnnnnnnnnnnnnnnnnnnnnnnnnnnnnnnnnnnnnnnnnnnnnnnnnnnnnnnnnnnnnnnnnnnnnnnnnnnnnnnnnnnnnnnnnnnnnnnnnnnnnnnnnnnnnnnnnnnnnnnnnnnnnnnnnnnnnnnnnnnnnnnnnnnnnnnnnnnnnnnnnnnnnnnnnnnnnnnnnnnnnnnnnnnnnnnnnnnnnnnnnnnnnnnnnnnnnnnnnnnnnnnnnnnnnnnnnnnnnnnnnnnnnnnnnnnnnnnnnnnnnnnnnnnnnnnnnnnnnnnnnnnnnnnnnnnnnnnnnnnnnnnnnnnnnnnnnnnnnnnnnnnnnnnnnnnnnnnnnnnnnnnnnnnnnnnnnnnnnnnnnnnnnnnnnnnnnnnnnnnnnnnnnnnnnnnnnnnnnnnnnnnnnnnnnnnnnnnnnnnnnnnnnnnnnnnnnnnnnnnnnnnnnnnnnnnnnnnnnnnnnnnnnnnnnnnnnnnnnnnnnnnnnnnnnnnnnnnnnnnnnnnnnnnnnnnnnnnnnnnnnnnnnnnnnnnnnnnnnnnnnnnnnnnnnnnnnnnnnnnnnnnnnnnnnnnnnnnnnnnnnnnnnnnnnnnnnnnnnnnnnnnnnnnnnnnnnnnnnnnnnnnnnnnnnnnnnnnnnnnnnnnnnnnnnnnnnnnnnnnnnnnnnnnnnnnnnnnnnnnnnnnnnnnnnnnnnnnnnnnnnnnnnnnnnnnnnnnnnnnnnnnnnnnnnnnnnnnnnnnnnnnnnnnnnnnnnnnnnnnnnnnnnnnnnnnnnnnnnnnnnnnnnnnnnnnnnnnnnnnnnnnnnnnnnnnnnnnnnnnnnnnnnnnnnnnnnnnnnnnnnnnnnnnnnnnnnnnnnnnnnnnnnnnnnnnnnnnnnnnnnnnnnnnnnnnnnnnnnnnnnnnnnnnnnnnnnnnnnnnnnnnnnnnnnnnnnnnnnnnnnnnnnnnnnnnnnnnnnnnnnnnnnnnnnnnnnnnnnnnnnnnnnnnnnnnnnnnnnnnnnnnnnnnnnnnnnnnnnnnnnnnnnnnnnnnnnnnnnnnnnnnnnnnnnnnnnnnnnnnnnnnnnnnnnnnnnnnnnnnnnnnnnnnnnnnnnnnnnnnnnnnnnnnnnnnnnnnnnnnnnnnnnnnnnnnnnnnnnnnnnnnnnnnnnnnnnnnnnnnnnnnnnnnnnnnnnnnnnnnnnnnnnnnnnnnnnnnnnnnnnnnnnnnnnnnnnnnnnnnnnnnnnnnnnnnnnnnnnnnnnnnnnnnnnnnnnnnnnnnnnnnnnnnnnnnnnnnnnnnnnnnnnnnnnnnnnnnnnnnnnnnnnnnnnnnnnnnnnnnnnnnnnnnnnnnnnnnnnnnnnnnnnnnnnnnnnnnnnnnnnnnnnnnnnnnnnnnnnnnnnnnnnnnnnnnnnnnnnnnnnnnnnnnnnnnnnnnnnnnnnnnnnnnnnnnnnnnnnnnnnnnnnnnnnnnnnnnnnnnnnnnnnnnnnnnnnnnnnnnnnnnnnnnnnnnnnnnnnnnnnnnnnnnnnnnnnnnnnnnnnnnnnnnnnnnnnnnnnnnnnnnnnnnnnnnnnnnnnnnnnnnnnnnnnnnnnnnnnnnnnnnnnnnnnnnnnnnnnnnnnnnnnnnnnnnnnnnnnnnnnnnnnnnnnnnnnnnnnnnnnnnnnnnnnnnnnnnnnnnnnnnnnnnnnnnnnnnnnnnnnnnnnnnnnnnnnnnnnnnnnnnnnnnnnnnnnnnnnnnnnnnnnnnnnnnnnnnnnnnnnnnnnnnnnnnnnnnnnnnnnnnnnnnnnnnnnnnnnnnnnnnnnnnnnnnnnnnnnnnnnnnnnnnnnnnnnnnnnnnnnnnnnnnnnnnnnnnnnnnnnnnnnnnnnnnnnnnnnnnnnnnnnnnnnnnnnnnnnnnnnnnnnnnnnnnnnnnnnnnnnnnnnnnnnnnnnnnnnnnnnnnnnnnnnnnnnnnnnnnnnnnnnnnnnnnnnnnnnnnnnnnnnnnnnnnnnnnnnnnnnnnnnnnnnnnnnnnnnnnnnnnnnnnnnnnnnnnnnnnnnnnnnnnnnnnnnnnnnnnnnnnnnnnnnnnnnnnnnnnnnnnnnnnnnnnnnnnnnnnnnnnnnnnnnnnnnnnnnnnnnnnnnnnnnnnnnnnnnnnnnnnnnnnnnnnnnnnnnnnnnnnnnnnnnnnnnnnnnnnnnnnnnnnnnnnnnnnnnnnnnnnnnnnnnnnnnnnnnnnnnnnnnnnnnnnnnnnnnnnnnnnnnnnnnnnnnnnnnnnnnnnnnnnnnnnnnnnnnnnnnnnnnnnnnnnnnnnnnnnnnnnnnnnnnnnnnnnnnnnnnnnnnnnnnnnnnnnnnnnnnnnnnnnnnnnnnnnnnnnnnnnnnnnnnnnnnnnnnnnnnnnnnnnnnnnnnnnnnnnnnnnnnnnnnnnnnnnnnnnnnnnnnnnnnnnnnnnnnnnnnnnnnnnnnnnnnnnnnnnnnnnnnnnnnnnnnnnnnnnnnnnnnnnnnnnnnnnnnnnnnnnnnnnnnnnnnnnnnnnnnnnnnnnnnnnnnnnnnnnnnnnnnnnnnnnnnnnnnnnnnnnnnnnnnnnnnnnnnnnnnnnnnnnnnnnnnnnnnnnnnnnnnnnnnnnnnnnnnnnnnnnnnnnnnnnnnnnnnnnnnnnnnnnnnnnnnnnnnnnnnnnnnnnnnnnnnnnnnnnnnnnnnnnnnnnnnnnnnnnnnnnnnnnnnnnnnnnnnnnnnnnnnnnnnnnnnnnnnnnnnnnnnnnnnnnnnnnnnnnnnnnnnnnnnnnnnnnnnnnnnnnnnnnnnnnnnnnnnnnnnnnnnnnnnnnnnnnnnnnnnnnnnnnnnnnnnnnnnnnnnnnnnnnnnnnnnnnnnnnnnnnnnnnnnnnnnnnnnnnnnnnnnnnnnnnnnnnnnnnnnnnnnnnnnnnnnnnnnnnnnnnnnnnnnnnnnnnnnnnnnnnnnnnnnnnnnnnnnnnnnnnnnnnnnnnnnnnnnnnnnnnnnnnnnnnnnnnnnnnnnnnnnnnnnnnnnnnnnnnnnnnnnnnnnnnnnnnnnnnnnnnnnnnnnnnnnnnnnnnnnnnnnnnnnnnnnnnnnnnnnnnnnnnnnnnnnnnnnnnnnnnnnnnnnnnnnnnnnnnnnnnnnnnnnnnnnnnnnnnnnnnnnnnnnnnnnnnnnnnnnnnnnnnnnnnnnnnnnnnnnnnnnnnnnnnnnnnnnnnnnnnnnnnnnnnnnnnnnnnnnnnnnnnnnnnnnnnnnnnnnnnnnnnnnnnnnnnnnnnnnnnnnnnnnnnnnnnnnnnnnnnnnnnnnnnnnnnnnnnnnnnnnnnnnnnnnnnnnnnnnnnnnnnnnnnnnnnnnnnnnnnnnnnnnnnnnnnnnnnnnnnnnnnnnnnnnnnnnnnnnnnnnnnnnnnnnnnnnnnnnnnnnnnnnnnnnnnnnnnnnnnnnnnnnnnnnnnnnnnnnnnnnnnnnnnnnnnnnnnnnnnnnnnnnnnnnnnnnnnnnnnnnnnnnnnnnnnnnnnnnnnnnnnnnnnnnnnnnnnnnnnnnnnnnnnnnnnnnnnnnnnnnnnnnnnnnnnnnnnnnnnnnnnnnnnnnnnnnnnnnnnnnnnnnnnnnnnnnnnnnnnnnnnnnnnnnnnnnnnnnnnnnnnnnnnnnnnnnnnnnnnnnnnnnnnnnnnnnnnnnnnnnnnnnnnnnnnnnnnnnnnnnnnnnnnnnnnnnnnnnnnnnnnnnnnnnnnnnnnnnnnnnnnnnnnnnnnnnnnnnnnnnnnnnnnnnnnnnnnnnnnnnnnnnnnnnnnnnnnnnnnnnnnnnnnnnnnnnnnnnnnnnnnnnnnnnnnnnnnnnnnnnnnnnnnnnnnnnnnnnnnnnnnnnnnnnnnnnnnnnnnnnnnnnnnnnnnnnnnnnnnnnnnnnnnnnnnnnnnnnnnnnnnnnnnnnnnnnnnnnnnnnnnnnnnnnnnnnnnnnnnnnnnnnnnnnnnnnnnnnnnnnnnnnnnnnnnnnnnnnnnnnnnnnnnnnnnnnnnnnnnnnnnnnnnnnnnnnnnnnnnnnnnnnnnnnnnnnnnnnnnnnnnnnnnnnnnnnnnnnnnnnnnnnnnnnnnnnnnnnnnnnnnnnnnnnnnnnnnnnnnnnnnnnnnnnnnnnnnnnnnnnnnnnnnnnnnnnnnnnnnnnnnnnnnnnnnnnnnnnnnnnnnnnnnnnnnnnnnnnnnnnnnnnnnnnnnnnnnnnnnnnnnnnnnnnnnnnnnnnnnnnnnnnnnnnnnnnnnnnnnnnnnnnnnnnnnnnnnnnnnnnnnnnnnnnnnnnnnnnnnnnnnnnnnnnnnnnnnnnnnnnnnnnnnnnnnnnnnnnnnnnnnnnnnnnnnnnnnnnnnnnnnnnnnnnnnnnnnnnnnnnnnnnnnnnnnnnnnnnnnnnnnnnnnnnnnnnnnnnnnnnnnnnnnnnnnnnnnnnnnnnnnnnnnnnnnnnnnnnnnnnnnnnnnnnnnnnnnnnnnnnnnnnnnnnnnnnnnnnnnnnnnnnnnnnnnnnnnnnnnnnnnnnnnnnnnnnnnnnnnnnnnnnnnnnnnnnnnnnnnnnnnnnnnnnnnnnnnnnnnnnnnnnnnnnnnnnnnnnnnnnnnnnnnnnnnnnnnnnnnnnnnnnnnnnnnnnnnnnnnnnnnnnnnnnnnnnnnnnnnnnnnnnnnnnnnnnnnnnnnnnnnnnnnnnnnnnnnnnnnnnnnnnnnnnnnnnnnnnnnnnnnnnnnnnnnnnnnnnnnnnnnnnnnnnnnnnnnnnnnnnnnnnnnnnnnnnnnnnnnnnnnnnnnnnnnnnnnnnnnnnnnnnnnnnnnnnnnnnnnnnnnnnnnnnnnnnnnnnnnnnnnnnnnnnnnnnnnnnnnnnnnnnnnnnnnnnnnnnnnnnnnnnnnnnnnnnnnnnnnnnnnnnnnnnnnnnnnnnnnnnnnnnnnnnnnnnnnnnnnnnnnnnnnnnnnnnnnnnnnnnnnnnnnnnnnnnnnnnnnnnnnnnnnnnnnnnnnnnnnnnnnnnnnnnnnnnnnnnnnnnnnnnnnnnnnnnnnnnnnnnnnnnnnnnnnnnnnnnnnnnnnnnnnnnnnnnnnnnnnnnnnnnnnnnnnnnnnnnnnnnnnnnnnnnnnnnnnnnnnnnnnnnnnnnnnnnnnnnnnnnnnnnnnnnnnnnnnnnnnnnnnnnnnnnnnnnnnnnnnnnnnnnnnnnnnnnnnnnnnnnnnnnnnnnnnnnnnnnnnnnnnnnnnnnnnnnnnnnnnnnnnnnnnnnnnnnnnnnnnnnnnnnnnnnnnnnnnnnnnnnnnnnnnnnnnnnnnnnnnnnnnnnnnnnnnnnnnnnnnnnnnnnnnnnnnnnnnnnnnnnnnnnnnnnnnnnnnnnnnnnnnnnnnnnnnnnnnnnnnnnnnnnnnnnnnnnnnnnnnnnnnnnnnnnnnnnnnnnnnnnnnnnnnnnnnnnnnnnnnnnnnnnnnnnnnnnnnnnnnnnnnnnnnnnnnnnnnnnnnnnnnnnnnnnnnnnnnnnnnnnnnnnnnnnnnnnnnnnnnnnnnnnnnnnnnnnnnnnnnnnnnnnnnnnnnnnnnnnnnnnnnnnnnnnnnnnnnnnnnnnnnnnnnnnnnnnnnnnnnnnnnnnnnnnnnnnnnnnnnnnnnnnnnnnnnnnnnnnnnnnnnnnnnnnnnnnnnnnnnnnnnnnnnnnnnnnnnnnnnnnnnnnnnnnnnnnnnnnnnnnnnnnnnnnnnnnnnnnnnnnnnnnnnnnnnnnnnnnnnnnnnnnnnnnnnnnnnnnnnnnnnnnnnnnnnnnnnnnnnnnnnnnnnnnnnnnnnnnnnnnnnnnnnnnnnnnnnnnnnnnnnnnnnnnnnnnnnnnnnnnnnnnnnnnnnnnnnnnnnnnnnnnnnnnnnnnnnnnnnnnnnnnnnnnnnnnnnnnnnnnnnnnnnnnnnnnnnnnnnnnnnnnnnnnnnnnnnnnnnnnnnnnnnnnnnnnnnnnnnnnnnnnnnnnnnnnnnnnnnnnnnnnnnnnnnnnnnnnnnnnnnnnnnnnnnnnnnnnnnnnnnnnnnnnnnnnnnnnnnnnnnnnnnnnnnnnnnnnnnnnnnnnnnnnnnnnnnnnnnnnnnnnnnnnnnnnnnnnnnnnnnnnnnnnnnnnnnnnnnnnnnnnnnnnnnnnnnnnnnnnnnnnnnnnnnnnnnnnnnnnnnnnnnnnnnnnnnnnnnnnnnnnnnnnnnnnnnnnnnnnnnnnnnnnnnnnnnnnnnnnnnnnnnnnnnnnnnnnnnnnnnnnnnnnnnnnnnnnnnnnnnnnnnnnnnnnnnnnnnnnnnnnnnnnnnnnnnnnnnnnnnnnnnnnnnnnnnnnnnnnnnnnnnnnnnnnnnnnnnnnnnnnnnnnnnnnnnnnnnnnnnnnnnnnnnnnnnnnnnnnnnnnnnnnnnnnnnnnnnnnnnnnnnnnnnnnnnnnnnnnnnnnnnnnnnnnnnnnnnnnnnnnnnnnnnnnnnnnnnnnnnnnnnnnnnnnnnnnnnnnnnnnnnnnnnnnnnnnnnnnnnnnnnnnnnnnnnnnnnnnnnnnnnnnnnnnnnnnnnnnnnnnnnnnnnnnnnnnnnnnnnnnnnnnnnnnnnnnnnnnnnnnnnnnnnnnnnnnnnnnnnnnnnnnnnnnnnnnnnnnnnnnnnnnnnnnnnnnnnnnnnnnnnnnnnnnnnnnnnnnnnnnnnnnnnnnnnnnnnnnnnnnnnnnnnnnnnnnnnnnnnnnnnnnnnnnnnnnnnnnnnnnnnnnnnnnnnnnnnnnnnnnnnnnnnnnnnnnnnnnnnnnnnnnnnnnnnnnnnnnnnnnnnnnnnnnnnnnnnnnnnnnnnnnnnnnnnnnnnnnnnnnnnnnnnnnnnnnnnnnnnnnnnnnnnnnnnnnnnnnnnnnnnnnnnnnnnnnnnnnnnnnnnnnnnnnnnnnnnnnnnnnnnnnnnnnnnnnnnnnnnnnnnnnnnnnnnnnnnnnnnnnnnnnnnnnnnnnnnnnnnnnnnnnnnnnnnnnnnnnnnnnnnnnnnnnnnnnnnnnnnnnnnnnnnnnnnnnnnnnnnnnnnnnnnnnnnnnnnnnnnnnnnnnnnnnnnnnnnnnnnnnnnnnnnnnnnnnnnnnnnnnnnnnnnnnnnnnnnnnnnnnnnnnnnnnnnnnnnnnnnnnnnnnnnnnnnnnnnnnnnnnnnnnnnnnnnnnnnnnnnnnnnnnnnnnnnnnnnnnnnnnnnnnnnnnnnnnnnnnnnnnnnnnnnnnnnnnnnnnnnnnnnnnnnnnnnnnnnnnnnnnnnnnnnnnnnnnnnnnnnnnnnnnnnnnnnnnnnnnnnnnnnnnnnnnnnnnnnnnnnnnnnnnnnnnnnnnnnnnnnnnnnnnnnnnnnnnnnnnnnnnnnnnnnnnnnnnnnnnnnnnnnnnnnnnnnnnnnnnnnnnnnnnnnnnnnnnnnnnnnnnnnnnnnnnnnnnnnnnnnnnnnnnnnnnnnnnnnnnnnnnnnnnnnnnnnnnnnnnnnnnnnnnnnnnnnnnnnnnnnnnnnnnnnnnnnnnnnnnnnnnnnnnnnnnnnnnnnnnnnnnnnnnnnnnnnnnnnnnnnnnnnnnnnnnnnnnnnnnnnnnnnnnnnnnnnnnnnnnnnnnnnnnnnnnnnnnnnnnnnnnnnnnnnnnnnnnnnnnnnnnnnnnnnnnnnnnnnnnnnnnnnnnnnnnnnnnnnnnnnnnnnnnnnnnnnnnnnnnnnnnnnnnnnnnnnnnnnnnnnnnnnnnnnnnnnnnnnnnnnnnnnnnnnnnnnnnnnnnnnnnnnnnnnnnnnnnnnnnnnnnnnnnnnnnnnnnnnnnnnnnnnnnnnnnnnnnnnnnnnnnnnnnnnnnnnnnnnnnnnnnnnnnnnnnnnnnnnnnnnnnnnnnnnnnnnnnnnnnnnnnnnnnnnnnnnnnnnnnnnnnnnnnnnnnnnnnnnnnnnnnnnnnnnnnnnnnnnnnnnnnnnnnnnnnnnnnnnnnnnnnnnnnnnnnnnnnnnnnnnnnnnnnnnnnnnnnnnnnnnnnnnnnnnnnnnnnnnnnnnnnnnnnnnnnnnnnnnnnnnnnnnnnnnnnnnnnnnnnnnnnnnnnnnnnnnnnnnnnnnnnnnnnnnnnnnnnnnnnnnnnnnnnnnnnnnnnnnnnnnnnnnnnnnnnnnnnnnnnnnnnnnnnnnnnnnnnnnnnnnnnnnnnnnnnnnnnnnnnnnnnnnnnnnnnnnnnnnnnnnnnnnnnnnnnnnnnnnnnnnnnnnnnnnnnnnnnnnnnnnnnnnnnnnnnnnnnnnnnnnnnnnnnnnnnnnnnnnnnnnnnnnnnnnnnnnnnnnnnnnnnnnnnnnnnnnnnnnnnnnnnnnnnnnnnnnnnnnnnnnnnnnnnnnnnnnnnnnnnnnnnnnnnnnnnnnnnnnnnnnnnnnnnnnnnnnnnnnnnnnnnnnnnnnnnnnnnnnnnnnnnnnnnnnnnnnnnnnnnnnnnnnnnnnnnnnnnnnnnnnnnnnnnnnnnnnnnnnnnnnnnnnnnnnnnnnnnnnnnnnnnnnnnnnnnnnnnnnnnnnnnnnnnnnnnnnnnnnnnnnnnnnnnnnnnnnnnnnnnnnnnnnnnnnnnnnnnnnnnnnnnnnnnnnnnnnnnnnnnnnnnnnnnnnnnnnnnnnnnnnnnnnnnnnnnnnnnnnnnnnnnnnnnnnnnnnnnnnnnnnnnnnnnnnnnnnnnnnnnnnnnnnnnnnnnnnnnnnnnnnnnnnnnnnnnnnnnnnnnnnnnnnnnnnnnnnnnnnnnnnnnnnnnnnnnnnnnnnnnnnnnnnnnnnnnnnnnnnnnnnnnnnnnnnnnnnnnnnnnnnnnnnnnnnnnnnnnnnnnnnnnnnnnnnnnnnnnnnnnnnnnnnnnnnnnnnnnnnnnnnnnnnnnnnnnnnnnnnnnnnnnnnnnnnnnnnnnnnnnnnnnnnnnnnnnnnnnnnnnnnnnnnnnnnnnnnnnnnnnnnnnnnnnnnnnnnnnnnnnnnnnnnnnnnnnnnnnnnnnnnnnnnnnnnnnnnnnnnnnnnnnnnnnnnnnnnnnnnnnnnnnnnnnnnnnnnnnnnnnnnnnnnnnnnnnnnnnnnnnnnnnnnnnnnnnnnnnnnnnnnnnnnnnnnnnnnnnnnnnnnnnnnnnnnnnnnnnnnnnnnnnnnnnnnnnnnnnnnnnnnnnnnnnnnnnnnnnnnnnnnnnnnnnnnnnnnnnnnnnnnnnnnnnnnnnnnnnnnnnnnnnnnnnnnnnnnnnnnnnnnnnnnnnnnnnnnnnnnnnnnnnnnnnnnnnnnnnnnnnnnnnnnnnnnnnnnnnnnnnnnnnnnnnnnnnnnnnnnnnnnnnnnnnnnnnnnnnnnnnnnnnnnnnnnnnnnnnnnnnnnnnnnnnnnnnnnnnnnnnnnnnnnnnnnnnnnnnnnnnnnnnnnnnnnnnnnnnnnnnnnnnnnnnnnnnnnnnnnnnnnnnnnnnnnnnnnnnnnnnnnnnnnnnnnnnnnnnnnnnnnnnnnnnnnnnnnnnnnnnnnnnnnnnnnnnnnnnnnnnnnnnnnnnnnnnnnnnnnnnnnnnnnnnnnnnnnnnnnnnnnnnnnnnnnnnnnnnnnnnnnnnnnnnnnnnnnnnnnnnnnnnnnnnnnnnnnnnnnnnnnnnnnnnnnnnnnnnnnnnnnnnnnnnnnnnnnnnnnnnnnnnnnnnnnnnnnnnnnnnnnnnnnnnnnnnnnnnnnnnnnnnnnnnnnnnnnnnnnnnnnnnnnnnnnnnnnnnnnnnnnnnnnnnnnnnnnnnnnnnnnnnnnnnnnnnnnnnnnnnnnnnnnnnnnnnnnnnnnnnnnnnnnnnnnnnnnnnnnnnnnnnnnnnnnnnnnnnnnnnnnnnnnnnnnnnnnnnnnnnnnnnnnnnnnnnnnnnnnnnnnnnnnnnnnnnnnnnnnnnnnnnnnnnnnnnnnnnnnnnnnnnnnnnnnnnnnnnnnnnnnnnnnnnnnnnnnnnnnnnnnnnnnnnnnnnnnnnnnnnnnnnnnnnnnnnnnnnnnnnnnnnnnnnnnnnnnnnnnnnnnnnnnnnnnnnnnnnnnnnnnnnnnnnnnnnnnnnnnnnnnnnnnnnnnnnnnnnnnnnnnnnnnnnnnnnnnnnnnnnnnnnnnnnnnnnnnnnnnnnnnnnnnnnnnnnnnnnnnnnnnnnnnnnnnnnnnnnnnnnnnnnnnnnnnnnnnnnnnnnnnnnnnnnnnnnnnnnnnnnnnnnnnnnnnnnnnnnnnnnnnnnnnnnnnnnnnnnnnnnnnnnnnnnnnnnnnnnnnnnnnnnnnnnnnnnnnnnnnnnnnnnnnnnnnnnnnnnnnnnnnnnnnnnnnnnnnnnnnnnnnnnnnnnnnnnnnnnnnnnnnnnnnnnnnnnnnnnnnnnnnnnnnnnnnnnnnnnnnnnnnnnnnnnnnnnnnnnnnnnnnnnnnnnnnnnnnnnnnnnnnnnnnnnnnnnnnnnnnnnnnnnnnnnnnnnnnnnnnnnnnnnnnnnnnnnnnnnnnnnnnnnnnnnnnnnnnnnnnnnnnnnnnnnnnnnnnnnnnnnnnnnnnnnnnnnnnnnnnnnnnnnnnnnnnnnnnnnnnnnnnnnnnnnnnnnnnnnnnnnnnnnnnnnnnnnnnnnnnnnnnnnnnnnnnnnnnnnnnnnnnnnnnnnnnnnnnnnnnnnnnnnnnnnnnnnnnnnnnnnnnnnnnnnnnnnnnnnnnnnnnnnnnnnnnnnnnnnnnnnnnnnnnnnnnnnnnnnnnnnnnnnnnnnnnnnnnnnnnnnnnnnnnnnnnnnnnnnnnnnnnnnnnnnnnnnnnnnnnnnnnnnnnnnnnnnnnnnnnnnnnnnnnnnnnnnnnnnnnnnnnnnnnnnnnnnnnnnnnnnnnnnnnnnnnnnnnnnnnnnnnnnnnnnnnnnnnnnnnnnnnnnnnnnnnnnnnnnnnnnnnnnnnnnnnnnnnnnnnnnnnnnnnnnnnnnnnnnnnnnnnnnnnnnnnnnnnnnnnnnnnnnnnnnnnnnnnnnnnnnnnnnnnnnnnnnnnnnnnnnnnnnnnnnnnnnnnnnnnnnnnnnnnnnnnnnnnnnnnnnnnnnnnnnnnnnnnnnnnnnnnnnnnnnnnnnnnnnnnnnnnnnnnnnnnnnnnnnnnnnnnnnnnnnnnnnnnnnnnnnnnnnnnnnnnnnnnnnnnnnnnnnnnnnnnnnnnnnnnnnnnnnnnnnnnnnnnnnnnnnnnnnnnnnnnnnnnnnnnnnnnnnnnnnnnnnnnnnnnnnnnnnnnnnnnnnnnnnnnnnnnnnnnnnnnnnnnnnnnnnnnnnnnnnnnnnnnnnnnnnnnnnnnnnnnnnnnnnnnnnnnnnnnnnnnnnnnnnnnnnnnnnnnnnnnnnnnnnnnnnnnnnnnnnnnnnnnnnnnnnnnnnnnnnnnnnnnnnnnnnnnnnnnnnnnnnnnnnnnnnnnnnnnnnnnnnnnnnnnnnnnnnnnnnnnnnnnnnnnnnnnnnnnnnnnnnnnnnnnnnnnnnnnnnnnnnnnnnnnnnnnnnnnnnnnnnnnnnnnnnnnnnnnnnnnnnnnnnnnnnnnnnnnnnnnnnnnnnnnnnnnnnnnnnnnnnnnnnnnnnnnnnnnnnnnnnnnnnnnnnnnnnnnnnnnnnnnnnnnnnnnnnnnnnnnnnnnnnnnnnnnnnnnnnnnnnnnnnnnnnnnnnnnnnnnnnnnnnnnnnnnnnnnnnnnnnnnnnnnnnnnnnnnnnnnnnnnnnnnnnnnnnnnnnnnnnnnnnnnnnnnnnnnnnnnnnnnnnnnnnnnnnnnnnnnnnnnnnnnnnnnnnnnnnnnnnnnnnnnnnnnnnnnnnnnnnnnnnnnnnnnnnnnnnnnnnnnnnnnnnnnnnnnnnnnnnnnnnnnnnnnnnnnnnnnnnnnnnnnnnnnnnnnnnnnnnnnnnnnnnnnnnnnnnnnnnnnnnnnnnnnnnnnnnnnnnnnnnnnnnnnnnnnnnnnnnnnnnnnnnnnnnnnnnnnnnnnnnnnnnnnnnnnnnnnnnnnnnnnnnnnnnnnnnnnnnnnnnnnnnnnnnnnnnnnnnnnnnnnnnnnnnnnnnnnnnnnnnnnnnnnnnnnnnnnnnnnnnnnnnnnnnnnnnnnnnnnnnnnnnnnnnnnnnnnnnnnnnnnnnnnnnnnnnnnnnnnnnnnnnnnnnnnnnnnnnnnnnnnnnnnnnnnnnnnnnnnnnnnnnnnnnnnnnnnnnnnnnnnnnnnnnnnnnnnnnnnnnnnnnnnnnnnnnnnnnnnnnnnnnnnnnnnnnnnnnnnnnnnnnnnnnnnnnnnnnnnnnnnnnnnnnnnnnnnnnnnnnnnnnnnnnnnnnnnnnnnnnnnnnnnnnnnnnnnnnnnnnnnnnnnnnnnnnnnnnnnnnnnnnnnnnnnnnnnnnnnnnnnnnnnnnnnnnnnnnnnnnnnnnnnnnnnnnnnnnnnnnnnnnnnnnnnnnnnnnnnnnnnnnnnnnnnnnnnnnnnnnnnnnnnnnnnnnnnnnnnnnnnnnnnnnnnnnnnnnnnnnnnnnnnnnnnnnnnnnnnnnnnnnnnnnnnnnnnnnnnnnnnnnnnnnnnnnnnnnnnnnnnnnnnnnnnnnnnnnnnnnnnnnnnnnnnnnnnnnnnnnnnnnnnnnnnnnnnnnnnnnnnnnnnnnnnnnnnnnnnnnnnnnnnnnnnnnnnnnnnnnnnnnnnnnnnnnnnnnnnnnnnnnnnnnnnnnnnnnnnnnnnnnnnnnnnnnnnnnnnnnnnnnnnnnnnnnnnnnnnnnnnnnnnnnnnnnnnnnnnnnnnnnnnnnnnnnnnnnnnnnnnnnnnnnnnnnnnnnnnnnnnnnnnnnnnnnnnnnnnnnnnnnnnnnnnnnnnnnnnnnnnnnnnnnnnnnnnnnnnnnnnnnnnnnnnnnnnnnnnnnnnnnnnnnnnnnnnnnnnnnnnnnnnnnnnnnnnnnnnnnnnnnnnnnnnnnnnnnnnnnnnnnnnnnnnnnnnnnnnnnnnnnnnnnnnnnnnnnnnnnnnnnnnnnnnnnnnnnnnnnnnnnnnnnnnnnnnnnnnnnnnnnnnnnnnnnnnnnnnnnnnnnnnnnnnnnnnnnnnnnnnnnnnnnnnnnnnnnnnnnnnnnnnnnnnnnnnnnnnnnnnnnnnnnnnnnnnnnnnnnnnnnnnnnnnnnnnnnnnnnnnnnnnnnnnnnnnnnnnnnnnnnnnnnnnnnnnnnnnnnnnnnnnnnnnnnnnnnnnnnnnnnnnnnnnnnnnnnnnnnnnnnnnnnnnnnnnnnnnnnnnnnnnnnnnnnnnnnnnnnnnnnnnnnnnnnnnnnnnnnnnnnnnnnnnnnnnnnnnnnnnnnnnnnnnnnnnnnnnnnnnnnnnnnnnnnnnnnnnnnnnnnnnnnnnnnnnnnnnnnnnnnnnnnnnnnnnnnnnnnnnnnnnnnnnnnnnnnnnnnnnnnnnnnnnnnnnnnnnnnnnnnnnnnnnnnnnnnnnnnnnnnnnnnnnnnnnnnnnnnnnnnnnnnnnnnnnnnnnnnnnnnnnnnnnnnnnnnnnnnnnnnnnnnnnnnnnnnnnnnnnnnnnnnnnnnnnnnnnnnnnnnnnnnnnnnnnnnnnnnnnnnnnnnnnnnnnnnnnnnnnnnnnnnnnnnnnnnnnnnnnnnnnnnnnnnnnnnnnnnnnnnnnnnnnnnnnnnnnnnnnnnnnnnnnnnnnnnnnnnnnnnnnnnnnnnnnnnnnnnnnnnnnnnnnnnnnnnnnnnnnnnnnnnnnnnnnnnnnnnnnnnnnnnnnnnnnnnnnnnnnnnnnnnnnnnnnnnnnnnnnnnnnnnnnnnnnnnnnnnnnnnnnnnnnnnnnnnnnnnnnnnnnnnnnnnnnnnnnnnnnnnnnnnnnnnnnnnnnnnnnnnnnnnnnnnnnnnnnnnnnnnnnnnnnnnnnnnnnnnnnnnnnnnnnnnnnnnnnnnnnnnnnnnnnnnnnnnnnnnnnnnnnnnnnnnnnnnnnnnnnnnnnnnnnnnnnnnnnnnnnnnnnnnnnnnnnnnnnnnnnnnnnnnnnnnnnnnnnnnnnnnnnnnnnnnnnnnnnnnnnnnnnnnnnnnnnnnnnnnnnnnnnnnnnnnnnnnnnnnnnnnnnnnnnnnnnnnnnnnnnnnnnnnnnnnnnnnnnnnnnnnnnnnnnnnnnnnnnnnnnnnnnnnnnnnnnnnnnnnnnnnnnnnnnnnnnnnnnnnnnnnnnnnnnnnnnnnnnnnnnnnnnnnnnnnnnnnnnnnnnnnnnnnnnnnnnnnnnnnnnnnnnnnnnnnnnnnnnnnnnnnnnnnnnnnnnnnnnnnnnnnnnnnnnnnnnnnnnnnnnnnnnnnnnnnnnnnnnnnnnnnnnnnnnnnnnnnnnnnnnnnnnnnnnnnnnnnnnnnnnnnnnnnnnnnnnnnnnnnnnnnnnnnnnnnnnnnnnnnnnnnnnnnnnnnnnnnnnnnnnnnnnnnnnnnnnnnnnnnnnnnnnnnnnnnnnnnnnnnnnnnnnnnnnnnnnnnnnnnnnnnnnnnnnnnnnnnnnnnnnnnnnnnnnnnnnnnnnnnnnnnnnnnnnnnnnnnnnnnnnnnnnnnnnnnnnnnnnnnnnnnnnnnnnnnnnnnnnnnnnnnnnnnnnnnnnnnnnnnnnnnnnnnnnnnnnnnnnnnnnnnnnnnnnnnnnnnnnnnnnnnnnnnnnnnnnnnnnnnnnnnnnnnnnnnnnnnnnnnnnnnnnnnnnnnnnnnnnnnnnnnnnnnnnnnnnnnnnnnnnnnnnnnnnnnnnnnnnnnnnnnnnnnnnnnnnnnnnnnnnnnnnnnnnnnnnnnnnnnnnnnnnnnnnnnnnnnnnnnnnnnnnnnnnnnnnnnnnnnnnnnnnnnnnnnnnnnnnnnnnnnnnnnnnnnnnnnnnnnnnnnnnnnnnnnnnnnnnnnnnnnnnnnnnnnnnnnnnnnnnnnnnnnnnnnnnnnnnnnnnnnnnnnnnnnnnnnnnnnnnnnnnnnnnnnnnnnnnnnnnnnnnnnnnnnnnnnnnnnnnnnnnnnnnnnnnnnnnnnnnnnnnnnnnnnnnnnnnnnnnnnnnnnnnnnnnnnnnnnnnnnnnnnnnnnnnnnnnnnnnnnnnnnnnnnnnnnnnnnnnnnnnnnnnnnnnnnnnnnnnnnnnnnnnnnnnnnnnnnnnnnnnnnnnnnnnnnnnnnnnnnnnnnnnnnnnnnnnnnnnnnnnnnnnnnnnnnnnnnnnnnnnnnnnnnnnnnnnnnnnnnnnnnnnnnnnnnnnnnnnnnnnnnnnnnnnnnnnnnnnnnnnnnnnnnnnnnnnnnnnnnnnnnnnnnnnnnnnnnnnnnnnnnnnnnnnnnnnnnnnnnnnnnnnnnnnnnnnnnnnnnnnnnnnnnnnnnnnnnnnnnnnnnnnnnnnnnnnnnnnnnnnnnnnnnnnnnnnnnnnnnnnnnnnnnnnnnnnnnnnnnnnnnnnnnnnnnnnnnnnnnnnnnnnnnnnnnnnnnnnnnnnnnnnnnnnnnnnnnnnnnnnnnnnnnnnnnnnnnnnnnnnnnnnnnnnnnnnnnnnnnnnnnnnnnnnnnnnnnnnnnnnnnnnnnnnnnnnnnnnnnnnnnnnnnnnnnnnnnnnnnnnnnnnnnnnnnnnnnnnnnnnnnnnnnnnnnnnnnnnnnnnnnnnnnnnnnnnnnnnnnnnnnnnnnnnnnnnnnnnnnnnnnnnnnnnnnnnnnnnnnnnnnnnnnnnnnnnnnnnnnnnnnnnnnnnnnnnnnnnnnnnnnnnnnnnnnnnnnnnnnnnnnnnnnnnnnnnnnnnnnnnnnnnnnnnnnnnnnnnnnnnnnnnnnnnnnnnnnnnnnnnnnnnnnnnnnnnnnnnnnnnnnnnnnnnnnnnnnnnnnnnnnnnnnnnnnnnnnnnnnnnnnnnnnnnnnnnnnnnnnnnnnnnnnnnnnnnnnnnnnnnnnnnnnnnnnnnnnnnnnnnnnnnnnnnnnnnnnnnnnnnnnnnnnnnnnnnnnnnnnnnnnnnnnnnnnnnnnnnnnnnnnnnnnnnnnnnnnnnnnnnnnnnnnnnnnnnnnnnnnnnnnnnnnnnnnnnnnnnnnnnnnnnnnnnnnnnnnnnnnnnnnnnnnnnnnnnnnnnnnnnnnnnnnnnnnnnnnnnnnnnnnnnnnnnnnnnnnnnnnnnnnnnnnnnnnnnnnnnnnnnnnnnnnnnnnnnnnnnnnnnnnnnnnnnnnnnnnnnnnnnnnnnnnnnnnnnnnnnnnnnnnnnnnnnnnnnnnnnnnnnnnnnnnnnnnnnnnnnnnnnnnnnnnnnnnnnnnnnnnnnnnnnnnnnnnnnnnnnnnnnnnnnnnnnnnnnnnnnnnnnnnnnnnnnnnnnnnnnnnnnnnnnnnnnnnnnnnnnnnnnnnnnnnnnnnnnnnnnnnnnnnnnnnnnnnnnnnnnnnnnnnnnnnnnnnnnnnnnnnnnnnnnnnnnnnnnnnnnnnnnnnnnnnnnnnnnnnnnnnnnnnnnnnnnnnnnnnnnnnnnnnnnnnnnnnnnnnnnnnnnnnnnnnnnnnnnnnnnnnnnnnnnnnnnnnnnnnnnnnnnnnnnnnnnnnnnnnnnnnnnnnnnnnnnnnnnnnnnnnnnnnnnnnnnnnnnnnnnnnnnnnnnnnnnnnnnnnnnnnnnnnnnnnnnnnnnnnnnnnnnnnnnnnnnnnnnnnnnnnnnnnnnnnnnnnnnnnnnnnnnnnnnnnnnnnnnnnnnnnnnnnnnnnnnnnnnnnnnnnnnnnnnnnnnnnnnnnnnnnnnnnnnnnnnnnnnnnnnnnnnnnnnnnnnnnnnnnnnnnnnnnnnnnnnnnnnnnnnnnnnnnnnnnnnnnnnnnnnnnnnnnnnnnnnnnnnnnnnnnnnnnnnnnnnnnnnnnnnnnnnnnnnnnnnnnnnnnnnnnnnnnnnnnnnnnnnnnnnnnnnnnnnnnnnnnnnnnnnnnnnnnnnnnnnnnnnnnnnnnnnnnnnnnnnnnnnnnnnnnnnnnnnnnnnnnnnnnnnnnnnnnnnnnnnnnnnnnnnnnnnnnnnnnnnnnnnnnnnnnnnnnnnnnnnnnnnnnnnnnnnnnnnnnnnnnnnnnnnnnnnnnnnnnnnnnnnnnnnnnnnnnnnnnnnnnnnnnnnnnnnnnnnnnnnnnnnnnnnnnnnnnnnnnnnnnnnnnnnnnnnnnnnnnnnnnnnnnnnnnnnnnnnnnnnnnnnnnnnnnnnnnnnnnnnnnnnnnnnnnnnnnnnnnnnnnnnnnnnnnnnnnnnnnnnnnnnnnnnnnnnnnnnnnnnnnnnnnnnnnnnnnnnnnnnnnnnnnnnnnnnnnnnnnnnnnnnnnnnnnnnnnnnnnnnnnnnnnnnnnnnnnnnnnnnnnnnnnnnnnnnnnnnnnnnnnnnnnnnnnnnnnnnnnnnnnnnnnnnnnnnnnnnnnnnnnnnnnnnnnnnnnnnnnnnnnnnnnnnnnnnnnnnnnnnnnnnnnnnnnnnnnnnnnnnnnnnnnnnnnnnnnnnnnnnnnnnnnnnnnnnnnnnnnnnnnnnnnnnnnnnnnnnnnnnnnnnnnnnnnnnnnnnnnnnnnnnnnnnnnnnnnnnnnnnnnnnnnnnnnnnnnnnnnnnnnnnnnnnnnnnnnnnnnnnnnnnnnnnnnnnnnnnnnnnnnnnnnnnnnnnnnnnnnnnnnnnnnnnnnnnnnnnnnnnnnnnnnnnnnnnnnnnnnnnnnnnnnnnnnnnnnnnnnnnnnnnnnnnnnnnnnnnnnnnnnnnnnnnnnnnnnnnnnnnnnnnnnnnnnnnnnnnnnnnnnnnnnnnnnnnnnnnnnnnnnnnnnnnnnnnnnnnnnnnnnnnnnnnnnnnnnnnnnnnnnnnnnnnnnnnnnnnnnnnnnnnnnnnnnnnnnnnnnnnnnnnnnnnnnnnnnnnnnnnnnnnnnnnnnnnnnnnnnnnnnnnnnnnnnnnnnnnnnnnnnnnnnnnnnnnnnnnnnnnnnnnnnnnnnnnnnnnnnnnnnnnnnnnnnnnnnnnnnnnnnnnnnnnnnnnnnnnnnnnnnnnnnnnnnnnnnnnnnnnnnnnnnnnnnnnnnnnnnnnnnnnnnnnnnnnnnnnnnnnnnnnnnnnnnnnnnnnnnnnnnnnnnnnnnnnnnnnnnnnnnnnnnnnnnnnnnnnnnnnnnnnnnnnnnnnnnnnnnnnnnnnnnnnnnnnnnnnnnnnnnnnnnnnnnnnnnnnnnnnnnnnnnnnnnnnnnnnnnnnnnnnnnnnnnnnnnnnnnnnnnnnnnnnnnnnnnnnnnnnnnnnnnnnnnnnnnnnnnnnnnnnnnnnnnnnnnnnnnnnnnnnnnnnnnnnnnnnnnnnnnnnnnnnnnnnnnnnnnnnnnnnnnnnnnnnnnnnnnnnnnnnnnnnnnnnnnnnnnnnnnnnnnnnnnnnnnnnnnnnnnnnnnnnnnnnnnnnnnnnnnnnnnnnnnnnnnnnnnnnnnnnnnnnnnnnnnnnnnnnnnnnnnnnnnnnnnnnnnnnnnnnnnnnnnnnnnnnnnnnnnnnnnnnnnnnnnnnnnnnnnnnnnnnnnnnnnnnnnnnnnnnnnnnnnnnnnnnnnnnnnnnnnnnnnnnnnnnnnnnnnnnnnnnnnnnnnnnnnnnnnnnnnnnnnnnnnnnnnnnnnnnnnnnnnnnnnnnnnnnnnnnnnnnnnnnnnnnnnnnnnnnnnnnnnnnnnnnnnnnnnnnnnnnnnnnnnnnnnnnnnnnnnnnnnnnnnnnnnnnnnnnnnnnnnnnnnnnnnnnnnnnnnnnnnnnnnnnnnnnnnnnnnnnnnnnnnnnnnnnnnnnnnnnnnnnnnnnnnnnnnnnnnnnnnnnnnnnnnnnnnnnnnnnnnnnnnnnnnnnnnnnnnnnnnnnnnnnnnnnnnnnnnnnnnnnnnnnnnnnnnnnnnnnnnnnnnnnnnnnnnnnnnnnnnnnnnnnnnnnnnnnnnnnnnnnnnnnnnnnnnnnnnnnnnnnnnnnnnnnnnnnnnnnnnnnnnnnnnnnnnnnnnnnnnnnnnnnnnnnnnnnnnnnnnnnnnnnnnnnnnnnnnnnnnnnnnnnnnnnnnnnnnnnnnnnnnnnnnnnnnnnnnnnnnnnnnnnnnnnnnnnnnnnnnnnnnnnnnnnnnnnnnnnnnnnnnnnnnnnnnnnnnnnnnnnnnnnnnnnnnnnnnnnnnnnnnnnnnnnnnnnnnnnnnnnnnnnnnnnnnnnnnnnnnnnnnnnnnnnnnnnnnnnnnnnnnnnnnnnnnnnnnnnnnnnnnnnnnnnnnnnnnnnnnnnnnnnnnnnnnnnnnnnnnnnnnnnnnnnnnnnnnnnnnnnnnnnnnnnnnnnnnnnnnnnnnnnnnnnnnnnnnnnnnnnnnnnnnnnnnnnnnnnnnnnnnnnnnnnnnnnnnnnnnnnnnnnnnnnnnnnnnnnnnnnnnnnnnnnnnnnnnnnnnnnnnnnnnnnnnnnnnnnnnnnnnnnnnnnnnnnnnnnnnnnnnnnnnnnnnnnnnnnnnnnnnnnnnnnnnnnnnnnnnnnnnnnnnnnnnnnnnnnnnnnnnnnnnnnnnnnnnnnnnnnnnnnnnnnnnnnnnnnnnnnnnnnnnnnnnnnnnnnnnnnnnnnnnnnnnnnnnnnnnnnnnnnnnnnnnnnnnnnnnnnnnnnnnnnnnnnnnnnnnnnnnnnnnnnnnnnnnnnnnnnnnnnnnnnnnnnnnnnnnnnnnnnnnnnnnnnnnnnnnnnnnnnnnnnnnnnnnnnnnnnnnnnnnnnnnnnnnnnnnnnnnnnnnnnnnnnnnnnnnnnnnnnnnnnnnnnnnnnnnnnnnnnnnnnnnnnnnnnnnnnnnnnnnnnnnnnnnnnnnnnnnnnnnnnnnnnnnnnnnnnnnnnnnnnnnnnnnnnnnnnnnnnnnnnnnnnnnnnnnnnnnnnnnnnnnnnnnnnnnnnnnnnnnnnnnnnnnnnnnnnnnnnnnnnnnnnnnnnnnnnnnnnnnnnnnnnnnnnnnnnnnnnnnnnnnnnnnnnnnnnnnnnnnnnnnnnnnnnnnnnnnnnnnnnnnnnnnnnnnnnnnnnnnnnnnnnnnnnnnnnnnnnnnnnnnnnnnnnnnnnnnnnnnnnnnnnnnnnnnnnnnnnnnnnnnnnnnnnnnnnnnnnnnnnnnnnnnnnnnnnnnnnnnnnnnnnnnnnnnnnnnnnnnnnnnnnnnnnnnnnnnnnnnnnnnnnnnnnnnnnnnnnnnnnnnnnnnnnnnnnnnnnnnnnnnnnnnnnnnnnnnnnnnnnnnnnnnnnnnnnnnnnnnnnnnnnnnnnnnnnnnnnnnnnnnnnnnnnnnnnnnnnnnnnnnnnnnnnnnnnnnnnnnnnnnnnnnnnnnnnnnnnnnnnnnnnnnnnnnnnnnnnnnnnnnnnnnnnnnnnnnnnnnnnnnnnnnnnnnnnnnnnnnnnnnnnnnnnnnnnnnnnnnnnnnnnnnnnnnnnnnnnnnnnnnnnnnnnnnnnnnnnnnnnnnnnnnnnnnnnnnnnnnnnnnnnnnnnnnnnnnnnnnnnnnnnnnnnnnnnnnnnnnnnnnnnnnnnnnnnnnnnnnnnnnnnnnnnnnnnnnnnnnnnnnnnnnnnnnnnnnnnnnnnnnnnnnnnnnnnnnnnnnnnnnnnnnnnnnnnnnnnnnnnnnnnnnnnnnnnnnnnnnnnnnnnnnnnnnnnnnnnnnnnnnnnnnnnnnnnnnnnnnnnnnnnnnnnnnnnnnnnnnnnnnnnnnnnnnnnnnnnnnnnnnnnnnnnnnnnnnnnnnnnnnnnnnnnnnnnnnnnnnnnnnnnnnnnnnnnnnnnnnnnnnnnnnnnnnnnnnnnnnnnnnnnnnnnnnnnnnnnnnnnnnnnnnnnnnnnnnnnnnnnnnnnnnnnnnnnnnnnnnnnnnnnnnnnnnnnnnnnnnnnnnnnnnnnnnnnnnnnnnnnnnnnnnnnnnnnnnnnnnnnnnnnnnnnnnnnnnnnnnnnnnnnnnnnnnnnnnnnnnnnnnnnnnnnnnnnnnnnnnnnnnnnnnnnnnnnnnnnnnnnnnnnnnnnnnnnnnnnnnnnnnnnnnnnnnnnnnnnnnnnnnnnnnnnnnnnnnnnnnnnnnnnnnnnnnnnnnnnnnnnnnnnnnnnnnnnnnnnnnnnnnnnnnnnnnnnnnnnnnnnnnnnnnnnnnnnnnnnnnnnnnnnnnnnnnnnnnnnnnnnnnnnnnnnnnnnnnnnnnnnnnnnnnnnnnnnnnnnnnnnnnnnnnnnnnnnnnnnnnnnnnnnnnnnnnnnnnnnnnnnnnnnnnnnnnnnnnnnnnnnnnnnnnnnnnnnnnnnnnnnnnnnnnnnnnnnnnnnnnnnnnnnnnnnnnnnnnnnnnnnnnnnnnnnnnnnnnnnnnnnnnnnnnnnnnnnnnnnnnnnnnnnnnnnnnnnnnnnnnnnnnnnnnnnnnnnnnnnnnnnnnnnnnnnnnnnnnnnnnnnnnnnnnnnnnnnnnnnnnnnnnnnnnnnnnnnnnnnnnnnnnnnnnnnnnnnnnnnnnnnnnnnnnnnnnnnnnnnnnnnnnnnnnnnnnnnnnnnnnnnnnnnnnnnnnnnnnnnnnnnnnnnnnnnnnnnnnnnnnnnnnnnnnnnnnnnnnnnnnnnnnnnnnnnnnnnnnnnnnnnnnnnnnnnnnnnnnnnnnnnnnnnnnnnnnnnnnnnnnnnnnnnnnnnnnnnnnnnnnnnnnnnnnnnnnnnnnnnnnnnnnnnnnnnnnnnnnnnnnnnnnnnnnnnnnnnnnnnnnnnnnnnnnnnnnnnnnnnnnnnnnnnnnnnnnnnnnnnnnnnnnnnnnnnnnnnnnnnnnnnnnnnnnnnnnnnnnnnnnnnnnnnnnnnnnnnnnnnnnnnnnnnnnnnnnnnnnnnnnnnnnnnnnnnnnnnnnnnnnnnnnnnnnnnnnnnnnnnnnnnnnnnnnnnnnnnnnnnnnnnnnnnnnnnnnnnnnnnnnnnnnnnnnnnnnnnnnnnnnnnnnnnnnnnnnnnnnnnnnnnnnnnnnnnnnnnnnnnnnnnnnnnnnnnnnnnnnnnnnnnnnnnnnnnnnnnnnnnnnnnnnnnnnnnnnnnnnnnnnnnnnnnnnnnnnnnnnnnnnnnnnnnnnnnnnnnnnnnnnnnnnnnnnnnnnnnnnnnnnnnnnnnnnnnnnnnnnnnnnnnnnnnnnnnnnnnnnnnnnnnnnnnnnnnnnnnnnnnnnnnnnnnnnnnnnnnnnnnnnnnnnnnnnnnnnnnnnnnnnnnnnnnnnnnnnnnnnnnnnnnnnnnnnnnnnnnnnnnnnnnnnnnnnnnnnnnnnnnnnnnnnnnnnnnnnnnnnnnnnnnnnnnnnnnnnnnnnnnnnnnnnnnnnnnnnnnnnnnnnnnnnnnnnnnnnnnnnnnnnnnnnnnnnnnnnnnnnnnnnnnnnnnnnnnnnnnnnnnnnnnnnnnnnnnnnnnnnnnnnnnnnnnnnnnnnnnnnnnnnnnnnnnnnnnnnnnnnnnnnnnnnnnnnnnnnnnnnnnnnnnnnnnnnnnnnnnnnnnnnnnnnnnnnnnnnnnnnnnnnnnnnnnnnnnnnnnnnnnnnnnnnnnnnnnnnnnnnnnnnnnnnnnnnnnnnnnnnnnnnnnnnnnnnnnnnnnnnnnnnnnnnnnnnnnnnnnnnnnnnnnnnnnnnnnnnnnnnnnnnnnnnnnnnnnnnnnnnnnnnnnnnnnnnnnnnnnnnnnnnnnnnnnnnnnnnnnnnnnnnnnnnnnnnnnnnnnnnnnnnnnnnnnnnnnnnnnnnnnnnnnnnnnnnnnnnnnnnnnnnnnnnnnnnnnnnnnnnnnnnnnnnnnnnnnnnnnnnnnnnnnnnnnnnnnnnnnnnnnnnnnnnnnnnnnnnnnnnnnnnnnnnnnnnnnnnnnnnnnnnnnnnnnnnnnnnnnnnnnnnnnnnnnnnnnnnnnnnnnnnnnnnnnnnnnnnnnnnnnnnnnnnnnnnnnnnnnnnnnnnnnnnnnnnnnnnnnnnnnnnnnnnnnnnnnnnnnnnnnnnnnnnnnnnnnnnnnnnnnnnnnnnnnnnnnnnnnnnnnnnnnnnnnnnnnnnnnnnnnnnnnnnnnnnnnnnnnnnnnnnnnnnnnnnnnnnnnnnnnnnnnnnnnnnnnnnnnnnnnnnnnnnnnnnnnnnnnnnnnnnnnnnnnnnnnnnnnnnnnnnnnnnnnnnnnnnnnnnnnnnnnnnnnnnnnnnnnnnnnnnnnnnnnnnnnnnnnnnnnnnnnnnnnnnnnnnnnnnnnnnnnnnnnnnnnnnnnnnnnnnnnnnnnnnnnnnnnnnnnnnnnnnnnnnnnnnnnnnnnnnnnnnnnnnnnnnnnnnnnnnnnnnnnnnnnnnnnnnnnnnnnnnnnnnnnnnnnnnnnnnnnnnnnnnnnnnnnnnnnnnnnnnnnnnnnnnnnnnnnnnnnnnnnnnnnnnnnnnnnnnnnnnnnnnnnnnnnnnnnnnnnnnnnnnnnnnnnnnnnnnnnnnnnnnnnnnnnnnnnnnnnnnnnnnnnnnnnnnnnnnnnnnnnnnnnnnnnnnnnnnnnnnnnnnnnnnnnnnnnnnnnnnnnnnnnnnnnnnnnnnnnnnnnnnnnnnnnnnnnnnnnnnnnnnnnnnnnnnnnnnnnnnnnnnnnnnnnnnnnnnnnnnnnnnnnnnnnnnnnnnnnnnnnnnnnnnnnnnnnnnnnnnnnnnnnnnnnnnnnnnnnnnnnnnnnnnnnnnnnnnnnnnnnnnnnnnnnnnnnnnnnnnnnnnnnnnnnnnnnnnnnnnnnnnnnnnnnnnnnnnnnnnnnnnnnnnnnnnnnnnnnnnnnnnnnnnnnnnnnnnnnnnnnnnnnnnnnnnnnnnnnnnnnnnnnnnnnnnnnnnnnnnnnnnnnnnnnnnnnnnnnnnnnnnnnnnnnnnnnnnnnnnnnnnnnnnnnnnnnnnnnnnnnnnnnnnnnnnnnnnnnnnnnnnnnnnnnnnnnnnnnnnnnnnnnnnnnnnnnnnnnnnnnnnnnnnnnnnnnnnnnnnnnnnnnnnnnnnnnnnnnnnnnnnnnnnnnnnnnnnnnnnnnnnnnnnnnnnnnnnnnnnnnnnnnnnnnnnnnnnnnnnnnnnnnnnnnnnnnnnnnnnnnnnnnnnnnnnnnnnnnnnnnnnnnnnnnnnnnnnnnnnnnnnnnnnnnnnnnnnnnnnnnnnnnnnnnnnnnnnnnnnnnnnnnnnnnnnnnnnnnnnnnnnnnnnnnnnnnnnnnnnnnnnnnnnnnnnnnnnnnnnnnnnnnnnnnnnnnnnnnnnnnnnnnnnnnnnnnnnnnnnnnnnnnnnnnnnnnnnnnnnnnnnnnnnnnnnnnnnnnnnnnnnnnnnnnnnnnnnnnnnnnnnnnnnnnnnnnnnnnnnnnnnnnnnnnnnnnnnnnnnnnnnnnnnnnnnnnnnnnnnnnnnnnnnnnnnnnnnnnnnnnnnnnnnnnnnnnnnnnnnnnnnnnnnnnnnnnnnnnnnnnnnnnnnnnnnnnnnnnnnnnnnnnnnnnnnnnnnnnnnnnnnnnnnnnnnnnnnnnnnnnnnnnnnnnnnnnnnnnnnnnnnnnnnnnnnnnnnnnnnnnnnnnnnnnnnnnnnnnnnnnnnnnnnnnnnnnnnnnnnnnnnnnnnnnnnnnnnnnnnnnnnnnnnnnnnnnnnnnnnnnnnnnnnnnnnnnnnnnnnnnnnnnnnnnnnnnnnnnnnnnnnnnnnnnnnnnnnnnnnnnnnnnnnnnnnnnnnnnnnnnnnnnnnnnnnnnnnnnnnnnnnnnnnnnnnnnnnnnnnnnnnnnnnnnnnnnnnnnnnnnnnnnnnnnnnnnnnnnnnnnnnnnnnnnnnnnnnnnnnnnnnnnnnnnnnnnnnnnnnnnnnnnnnnnnnnnnnnnnnnnnnnnnnnnnnnnnnnnnnnnnnnnnnnnnnnnnnnnnnnnnnnnnnnnnnnnnnnnnnnnnnnnnnnnnnnnnnnnnnnnnnnnnnnnnnnnnnnnnnnnnnnnnnnnnnnnnnnnnnnnnnnnnnnnnnnnnnnnnnnnnnnnnnnnnnnnnnnnnnnnnnnnnnnnnnnnnnnnnnnnnnnnnnnnnnnnnnnnnnnnnnnnnnnnnnnnnnnnnnnnnnnnnnnnnnnnnnnnnnnnnnnnnnnnnnnnnnnnnnnnnnnnnnnnnnnnnnnnnnnnnnnnnnnnnnnnnnnnnnnnnnnnnnnnnnnnnnnnnnnnnnnnnnnnnnnnnnnnnnnnnnnnnnnnnnnnnnnnnnnnnnnnnnnnnnnnnnnnnnnnnnnnnnnnnnnnnnnnnnnnnnnnnnnnnnnnnnnnnnnnnnnnnnnnnnnnnnnnnnnnnnnnnnnnnnnnnnnnnnnnnnnnnnnnnnnnnnnnnnnnnnnnnnnnnnnnnnnnnnnnnnnnnnnnnnnnnnnnnnnnnnnnnnnnnnnnnnnnnnnnnnnnnnnnnnnnnnnnnnnnnnnnnnnnnnnnnnnnnnnnnnnnnnnnnnnnnnnnnnnnnnnnnnnnnnnnnnnnnnnnnnnnnnnnnnnnnnnnnnnnnnnnnnnnnnnnnnnnnnnnnnnnnnnnnnnnnnnnnnnnnnnnnnnnnnnnnnnnnnnnnnnnnnnnnnnnnnnnnnnnnnnnnnnnnnnnnnnnnnnnnnnnnnnnnnnnnnnnnnnnnnnnnnnnnnnnnnnnnnnnnnnnnnnnnnnnnnnnnnnnnnnnnnnnnnnnnnnnnnnnnnnnnnnnnnnnnnnnnnnnnnnnnnnnnnnnnnnnnnnnnnnnnnnnnnnnnnnnnnnnnnnnnnnnnnnnnnnnnnnnnnnnnnnnnnnnnnnnnnnnnnnnnnnnnnnnnnnnnnnnnnnnnnnnnnnnnnnnnnnnnnnnnnnnnnnnnnnnnnnnnnnnnnnnnnnnnnnnnnnnnnnnnnnnnnnnnnnnnnnnnnnnnnnnnnnnnnnnnnnnnnnnnnnnnnnnnnnnnnnnnnnnnnnnnnnnnnnnnnnnnnnnnnnnnnnnnnnnnnnnnnnnnnnnnnnnnnnnnnnnnnnnnnnnnnnnnnnnnnnnnnnnnnnnnnnnnnnnnnnnnnnnnnnnnnnnnnnnnnnnnnnnnnnnnnnnnnnnnnnnnnnnnnnnnnnnnnnnnnnnnnnnnnnnnnnnnnnnnnnnnnnnnnnnnnnnnnnnnnnnnnnnnnnnnnnnnnnnnnnnnnnnnnnnnnnnnnnnnnnnnnnnnnnnnnnnnnnnnnnnnnnnnnnnnnnnnnnnnnnnnnnnnnnnnnnnnnnnnnnnnnnnnnnnnnnnnnnnnnnnnnnnnnnnnnnnnnnnnnnnnnnnnnnnnnnnnnnnnnnnnnnnnnnnnnnnnnnnnnnnnnnnnnnnnnnnnnnnnnnnnnnnnnnnnnnnnnnnnnnnnnnnnnnnnnnnnnnnnnnnnnnnnnnnnnnnnnnnnnnnnnnnnnnnnnnnnnnnnnnnnnnnnnnnnnnnnnnnnnnnnnnnnnnnnnnnnnnnnnnnnnnnnnnnnnnnnnnnnnnnnnnnnnnnnnnnnnnnnnnnnnnnnnnnnnnnnnnnnnnnnnnnnnnnnnnnnnnnnnnnnnnnnnnnnnnnnnnnnnnnnnnnnnnnnnnnnnnnnnnnnnnnnnnnnnnnnnnnnnnnnnnnnnnnnnnnnnnnnnnnnnnnnnnnnnnnnnnnnnnnnnnnnnnnnnnnnnnnnnnnnnnnnnnnnnnnnnnnnnnnnnnnnnnnnnnnnnnnnnnnnnnnnnnnnnnnnnnnnnnnnnnnnnnnnnnnnnnnnnnnnnnnnnnnnnnnnnnnnnnnnnnnnnnnnnnnnnnnnnnnnnnnnnnnnnnnnnnnnnnnnnnnnnnnnnnnnnnnnnnnnnnnnnnnnnnnnnnnnnnnnnnnnnnnnnnnnnnnnnnnnnnnnnnnnnnnnnnnnnnnnnnnnnnnnnnnnnnnnnnnnnnnnnnnnnnnnnnnnnnnnnnnnnnnnnnnnnnnnnnnnnnnnnnnnnnnnnnnnnnnnnnnnnnnnnnnnnnnnnnnnnnnnnnnnnnnnnnnnnnnnnnnnnnnnnnnnnnnnnnnnnnnnnnnnnnnnnnnnnnnnnnnnnnnnnnnnnnnnnnnnnnnnnnnnnnnnnnnnnnnnnnnnnnnnnnnnnnnnnnnnnnnnnnnnnnnnnnnnnnnnnnnnnnnnnnnnnnnnnnnnnnnnnnnnnnnnnnnnnnnnnnnnnnnnnnnnnnnnnnnnnnnnnnnnnnnnnnnnnnnnnnnnnnnnnnnnnnnnnnnnnnnnnnnnnnnnnnnnnnnnnnnnnnnnnnnnnnnnnnnnnnnnnnnnnnnnnnnnnnnnnnnnnnnnnnnnnnnnnnnnnnnnnnnnnnnnnnnnnnnnnnnnnnnnnnnnnnnnnnnnnnnnnnnnnnnnnnnnnnnnnnnnnnnnnnnnnnnnnnnnnnnnnnnnnnnnnnnnnnnnnnnnnnnnnnnnnnnnnnnnnnnnnnnnnnnnnnnnnnnnnnnnnnnnnnnnnnnnnnnnnnnnnnnnnnnnnnnnnnnnnnnnnnnnnnnnnnnnnnnnnnnnnnnnnnnnnnnnnnnnnnnnnnnnnnnnnnnnnnnnnnnnnnnnnnnnnnnnnnnnnnnnnnnnnnnnnnnnnnnnnnnnnnnnnnnnnnnnnnnnnnnnnnnnnnnnnnnnnnnnnnnnnnnnnnnnnnnnnnnnnnnnnnnnnnnnnnnnnnnnnnnnnnnnnnnnnnnnnnnnnnnnnnnnnnnnnnnnnnnnnnnnnnnnnnnnnnnnnnnnnnnnnnnnnnnnnnnnnnnnnnnnnnnnnnnnnnnnnnnnnnnnnnnnnnnnnnnnnnnnnnnnnnnnnnnnnnnnnnnnnnnnnnnnnnnnnnnnnnnnnnnnnnnnnnnnnnnnnnnnnnnnnnnnnnnnnnnnnnnnnnnnnnnnnnnnnnnnnnnnnnnnnnnnnnnnnnnnnnnnnnnnnnnnnnnnnnnnnnnnnnnnnnnnnnnnnnnnnnnnnnnnnnnnnnnnnnnnnnnnnnnnnnnnnnnnnnnnnnnnnnnnnnnnnnnnnnnnnnnnnnnnnnnnnnnnnnnnnnnnnnnnnnnnnnnnnnnnnnnnnnnnnnnnnnnnnnnnnnnnnnnnnnnnnnnnnnnnnnnnnnnnnnnnnnnnnnnnnnnnnnnnnnnnnnnnnnnnnnnnnnnnnnnnnnnnnnnnnnnnnnnnnnnnnnnnnnnnnnnnnnnnnnnnnnnnnnnnnnnnnnnnnnnnnnnnnnnnnnnnnnnnnnnnnnnnnnnnnnnnnnnnnnnnnnnnnnnnnnnnnnnnnnnnnnnnnnnnnnnnnnnnnnnnnnnnnnnnnnnnnnnnnnnnnnnnnnnnnnnnnnnnnnnnnnnnnnnnnnnnnnnnnnnnnnnnnnnnnnnnnnnnnnnnnnnnnnnnnnnnnnnnnnnnnnnnnnnnnnnnnnnnnnnnnnnnnnnnnnnnnnnnnnnnnnnnnnnnnnnnnnnnnnnnnnnnnnnnnnnnnnnnnnnnnnnnnnnnnnnnnnnnnnnnnnnnnnnnnnnnnnnnnnnnnnnnnnnnnnnnnnnnnnnnnnnnnnnnnnnnnnnnnnnnnnnnnnnnnnnnnnnnnnnnnnnnnnnnnnnnnnnnnnnnnnnnnnnnnnnnnnnnnnnnnnnnnnnnnnnnnnnnnnnnnnnnnnnnnnnnnnnnnnnnnnnnnnnnnnnnnnnnnnnnnnnnnnnnnnnnnnnnnnnnnnnnnnnnnnnnnnnnnnnnnnnnnnnnnnnnnnnnnnnnnnnnnnnnnnnnnnnnnnnnnnnnnnnnnnnnnnnnnnnnnnnnnnnnnnnnnnnnnnnnnnnnnnnnnnnnnnnnnnnnnnnnnnnnnnnnnnnnnnnnnnnnnnnnnnnnnnnnnnnnnnnnnnnnnnnnnnnnnnnnnnnnnnnnnnnnnnnnnnnnnnnnnnnnnnnnnnnnnnnnnnnnnnnnnnnnnnnnnnnnnnnnnnnnnnnnnnnnnnnnnnnnnnnnnnnnnnnnnnnnnnnnnnnnnnnnnnnnnnnnnnnnnnnnnnnnnnnnnnnnnnnnnnnnnnnnnnnnnnnnnnnnnnnnnnnnnnnnnnnnnnnnnnnnnnnnnnnnnnnnnnnnnnnnnnnnnnnnnnnnnnnnnnnnnnnnnnnnnnnnnnnnnnnnnnnnnnnnnnnnnnnnnnnnnnnnnnnnnnnnnnnnnnnnnnnnnnnnnnnnnnnnnnnnnnnnnnnnnnnnnnnnnnnnnnnnnnnnnnnnnnnnnnnnnnnnnnnnnnnnnnnnnnnnnnnnnnnnnnnnnnnnnnnnnnnnnnnnnnnnnnnnnnnnnnnnnnnnnnnnnnnnnnnnnnnnnnnnnnnnnnnnnnnnnnnnnnnnnnnnnnnnnnnnnnnnnnnnnnnnnnnnnnnnnnnnnnnnnnnnnnnnnnnnnnnnnnnnnnnnnnnnnnnnnnnnnnnnnnnnnnnnnnnnnnnnnnnnnnnnnnnnnnnnnnnnnnnnnnnnnnnnnnnnnnnnnnnnnnnnnnnnnnnnnnnnnnnnnnnnnnnnnnnnnnnnnnnnnnnnnnnnnnnnnnnnnnnnnnnnnnnnnnnnnnnnnnnnnnnnnnnnnnnnnnnnnnnnnnnnnnnnnnnnnnnnnnnnnnnnnnnnnnnnnnnnnnnnnnnnnnnnnnnnnnnnnnnnnnnnnnnnnnnnnnnnnnnnnnnnnnnnnnnnnnnnnnnnnnnnnnnnnnnnnnnnnnnnnnnnnnnnnnnnnnnnnnnnnnnnnnnnnnnnnnnnnnnnnnnnnnnnnnnnnnnnnnnnnnnnnnnnnnnnnnnnnnnnnnnnnnnnnnnnnnnnnnnnnnnnnnnnnnnnnnnnnnnnnnnnnnnnnnnnnnnnnnnnnnnnnnnnnnnnnnnnnnnnnnnnnnnnnnnnnnnnnnnnnnnnnnnnnnnnnnnnnnnnnnnnnnnnnnnnnnnnnnnnnnnnnnnnnnnnnnnnnnnnnnnnnnnnnnnnnnnnnnnnnnnnnnnnnnnnnnnnnnnnnnnnnnnnnnnnnnnnnnnnnnnnnnnnnnnnnnnnnnnnnnnnnnnnnnnnnnnnnnnnnnnnnnnnnnnnnnnnnnnnnnnnnnnnnnnnnnnnnnnnnnnnnnnnnnnnnnnnnnnnnnnnnnnnnnnnnnnnnnnnnnnnnnnnnnnnnnnnnnnnnnnnnnnnnnnnnnnnnnnnnnnnnnnnnnnnnnnnnnnnnnnnnnnnnnnnnnnnnnnnnnnnnnnnnnnnnnnnnnnnnnnnnnnnnnnnnnnnnnnnnnnnnnnnnnnnnnnnnnnnnnnnnnnnnnnnnnnnnnnnnnnnnnnnnnnnnnnnnnnnnnnnnnnnnnnnnnnnnnnnnnnnnnnnnnnnnnnnnnnnnnnnnnnnnnnnnnnnnnnnnnnnnnnnnnnnnnnnnnnnnnnnnnnnnnnnnnnnnnnnnnnnnnnnnnnnnnnnnnnnnnnnnnnnnnnnnnnnnnnnnnnnnnnnnnnnnnnnnnnnnnnnnnnnnnnnnnnnnnnnnnnnnnnnnnnnnnnnnnnnnnnnnnnnnnnnnnnnnnnnnnnnnnnnnnnnnnnnnnnnnnnnnnnnnnnnnnnnnnnnnnnnnnnnnnnnnnnnnnnnnnnnnnnnnnnnnnnnnnnnnnnnnnnnnnnnnnnnnnnnnnnnnnnnnnnnnnnnnnnnnnnnnnnnnnnnnnnnnnnnnnnnnnnnnnnnnnnnnnnnnnnnnnnnnnnnnnnnnnnnnnnnnnnnnnnnnnnnnnnnnnnnnnnnnnnnnnnnnnnnnnnnnnnnnnnnnnnnnnnnnnnnnnnnnnnnnnnnnnnnnnnnnnnnnnnnnnnnnnnnnnnnnnnnnnnnnnnnnnnnnnnnnnnnnnnnnnnnnnnnnnnnnnnnnnnnnnnnnnnnnnnnnnnnnnnnnnnnnnnnnnnnnnnnnnnnnnnnnnnnnnnnnnnnnnnnnnnnnnnnnnnnnnnnnnnnnnnnnnnnnnnnnnnnnnnnnnnnnnnnnnnnnnnnnnnnnnnnnnnnnnnnnnnnnnnnnnnnnnnnnnnnnnnnnnnnnnnnnnnnnnnnnnnnnnnnnnnnnnnnnnnnnnnnnnnnnnnnnnnnnnnnnnnnnnnnnnnnnnnnnnnnnnnnnnnnnnnnnnnnnnnnnnnnnnnnnnnnnnnnnnnnnnnnnnnnnnnnnnnnnnnnnnnnnnnnnnnnnnnnnnnnnnnnnnnnnnnnnnnnnnnnnnnnnnnnnnnnnnnnnnnnnnnnnnnnnnnnnnnnnnnnnnnnnnnnnnnnnnnnnnnnnnnnnnnnnnnnnnnnnnnnnnnnnnnnnnnnnnnnnnnnnnnnnnnnnnnnnnnnnnnnnnnnnnnnnnnnnnnnnnnnnnnnnnnnnnnnnnnnnnnnnnnnnnnnnnnnnnnnnnnnnnnnnnnnnnnnnnnnnnnnnnnnnnnnnnnnnnnnnnnnnnnnnnnnnnnnnnnnnnnnnnnnnnnnnnnnnnnnnnnnnnnnnnnnnnnnnnnnnnnnnnnnnnnnnnnnnnnnnnnnnnnnnnnnnnnnnnnnnnnnnnnnnnnnnnnnnnnnnnnnnnnnnnnnnnnnnnnnnnnnnnnnnnnnnnnnnnnnnnnnnnnnnnnnnnnnnnnnnnnnnnnnnnnnnnnnnnnnnnnnnnnnnnnnnnnnnnnnnnnnnnnnnnnnnnnnnnnnnnnnnnnnnnnnnnnnnnnnnnnnnnnnnnnnnnnnnnnnnnnnnnnnnnnnnnnnnnnnnnnnnnnnnnnnnnnnnnnnnnnnnnnnnnnnnnnnnnnnnnnnnnnnnnnnnnnnnnnnnnnnnnnnnnnnnnnnnnnnnnnnnnnnnnnnnnnnnnnnnnnnnnnnnnnnnnnnnnnnnnnnnnnnnnnnnnnnnnnnnnnnnnnnnnnnnnnnnnnnnnnnnnnnnnnnnnnnnnnnnnnnnnnnnnnnnnnnnnnnnnnnnnnnnnnnnnnnnnnnnnnnnnnnnnnnnnnnnnnnnnnnnnnnnnnnnnnnnnnnnnnnnnnnnnnnnnnnnnnnnnnnnnnnnnnnnnnnnnnnnnnnnnnnnnnnnnnnnnnnnnnnnnnnnnnnnnnnnnnnnnnnnnnnnnnnnnnnnnnnnnnnnnnnnnnnnnnnnnnnnnnnnnnnnnnnnnnnnnnnnnnnnnnnnnnnnnnnnnnnnnnnnnnnnnnnnnnnnnnnnnnnnnnnnnnnnnnnnnnnnnnnnnnnnnnnnnnnnnnnnnnnnnnnnnnnnnnnnnnnnnnnnnnnnnnnnnnnnnnnnnnnnnnnnnnnnnnnnnnnnnnnnnnnnnnnnnnnnnnnnnnnnnnnnnnnnnnnnnnnnnnnnnnnnnnnnnnnnnnnnnnnnnnnnnnnnnnnnnnnnnnnnnnnnnnnnnnnnnnnnnnnnnnnnnnnnnnnnnnnnnnnnnnnnnnnnnnnnnnnnnnnnnnnnnnnnnnnnnnnnnnnnnnnnnnnnnnnnnnnnnnnnnnnnnnnnnnnnnnnnnnnnnnnnnnnnnnnnnnnnnnnnnnnnnnnnnnnnnnnnnnnnnnnnnnnnnnnnnnnnnnnnnnnnnnnnnnnnnnnnnnnnnnnnnnnnnnnnnnnnnnnnnnnnnnnnnnnnnnnnnnnnnnnnnnnnnnnnnnnnnnnnnnnnnnnnnnnnnnnnnnnnnnnnnnnnnnnnnnnnnnnnnnnnnnnnnnnnnnnnnnnnnnnnnnnnnnnnnnnnnnnnnnnnnnnnnnnnnnnnnnnnnnnnnnnnnnnnnnnnnnnnnnnnnnnnnnnnnnnnnnnnnnnnnnnnnnnnnnnnnnnnnnnnnnnnnnnnnnnnnnnnnnnnnnnnnnnnnnnnnnnnnnnnnnnnnnnnnnnnnnnnnnnnnnnnnnnnnnnnnnnnnnnnnnnnnnnnnnnnnnnnnnnnnnnnnnnnnnnnnnnnnnnnnnnnnnnnnnnnnnnnnnnnnnnnnnnnnnnnnnnnnnnnnnnnnnnnnnnnnnnnnnnnnnnnnnnnnnnnnnnnnnnnnnnnnnnnnnnnnnnnnnnnnnnnnnnnnnnnnnnnnnnnnnnnnnnnnnnnnnnnnnnnnnnnnnnnnnnnnnnnnnnnnnnnnnnnnnnnnnnnnnnnnnnnnnnnnnnnnnnnnnnnnnnnnnnnnnnnnnnnnnnnnnnnnnnnnnnnnnnnnnnnnnnnnnnnnnnnnnnnnnnnnnnnnnnnnnnnnnnnnnnnnnnnnnnnnnnnnnnnnnnnnnnnnnnnnnnnnnnnnnnnnnnnnnnnnnnnnnnnnnnnnnnnnnnnnnnnnnnnnnnnnnnnnnnnnnnnnnnnnnnnnnnnnnnnnnnnnnnnnnnnnnnnnnnnnnnnnnnnnnnnnnnnnnnnnnnnnnnnnnnnnnnnnnnnnnnnnnnnnnnnnnnnnnnnnnnnnnnnnnnnnnnnnnnnnnnnnnnnnnnnnnnnnnnnnnnnnnnnnnnnnnnnnnnnnnnnnnnnnnnnnnnnnnnnnnnnnnnnnnnnnnnnnnnnnnnnnnnnnnnnnnnnnnnnnnnnnnnnnnnnnnnnnnnnnnnnnnnnnnnnnnnnnnnnnnnnnnnnnnnnnnnnnnnnnnnnnnnnnnnnnnnnnnnnnnnnnnnnnnnnnnnnnnnnnnnnnnnnnnnnnnnnnnnnnnnnnnnnnnnnnnnnnnnnnnnnnnnnnnnnnnnnnnnnnnnnnnnnnnnnnnnnnnnnnnnnnnnnnnnnnnnnnnnnnnnnnnnnnnnnnnnnnnnnnnnnnnnnnnnnnnnnnnnnnnnnnnnnnnnnnnnnnnnnnnnnnnnnnnnnnnnnnnnnnnnnnnnnnnnnnnnnnnnnnnnnnnnnnnnnnnnnnnnnnnnnnnnnnnnnnnnnnnnnnnnnnnnnnnnnnnnnnnnnnnnnnnnnnnnnnnnnnnnnnnnnnnnnnnnnnnnnnnnnnnnnnnnnnnnnnnnnnnnnnnnnnnnnnnnnnnnnnnnnnnnnnnnnnnnnnnnnnnnnnnnnnnnnnnnnnnnnnnnnnnnnnnnnnnnnnnnnnnnnnnnnnnnnnnnnnnnnnnnnnnnnnnnnnnnnnnnnnnnnnnnnnnnnnnnnnnnnnnnnnnnnnnnnnnnnnnnnnnnnnnnnnnnnnnnnnnnnnnnnnnnnnnnnnnnnnnnnnnnnnnnnnnnnnnnnnnnnnnnnnnnnnnnnnnnnnnnnnnnnnnnnnnnnnnnnnnnnnnnnnnnnnnnnnnnnnnnnnnnnnnnnnnnnnnnnnnnnnnnnnnnnnnnnnnnnnnnnnnnnnnnnnnnnnnnnnnnnnnnnnnnnnnnnnnnnnnnnnnnnnnnnnnnnnnnnnnnnnnnnnnnnnnnnnnnnnnnnnnnnnnnnnnnnnnnnnnnnnnnnnnnnnnnnnnnnnnnnnnnnnnnnnnnnnnnnnnnnnnnnnnnnnnnnnnnnnnnnnnnnnnnnnnnnnnnnnnnnnnnnnnnnnnnnnnnnnnnnnnnnnnnnnnnnnnnnnnnnnnnnnnnnnnnnnnnnnnnnnnnnnnnnnnnnnnnnnnnnnnnnnnnnnnnnnnnnnnnnnnnnnnnnnnnnnnnnnnnnnnnnnnnnnnnnnnnnnnnnnnnnnnnnnnnnnnnnnnnnnnnnnnnnnnnnnnnnnnnnnnnnnnnnnnnnnnnnnnnnnnnnnnnnnnnnnnnnnnnnnnnnnnnnnnnnnnnnnnnnnnnnnnnnnnnnnnnnnnnnnnnnnnnnnnnnnnnnnnnnnnnnnnnnnnnnnnnnnnnnnnnnnnnnnnnnnnnnnnnnnnnnnnnnnnnnnnnnnnnnnnnnnnnnnnnnnnnnnnnnnnnnnnnnnnnnnnnnnnnnnnnnnnnnnnnnnnnnnnnnnnnnnnnnnnnnnnnnnnnnnnnnnnnnnnnnnnnnnnnnnnnnnnnnnnnnnnnnnnnnnnnnnnnnnnnnnnnnnnnnnnnnnnnnnnnnnnnnnnnnnnnnnnnnnnnnnnnnnnnnnnnnnnnnnnnnnnnnnnnnnnnnnnnnnnnnnnnnnnnnnnnnnnnnnnnnnnnnnnnnnnnnnnnnnnnnnnnnnnnnnnnnnnnnnnnnnnnnnnnnnnnnnnnnnnnnnnnnnnnnnnnnnnnnnnnnnnnnnnnnnnnnnnnnnnnnnnnnnnnnnnnnnnnnnnnnnnnnnnnnnnnnnnnnnnnnnnnnnnnnnnnnnnnnnnnnnnnnnnnnnnnnnnnnnnnnnnnnnnnnnnnnnnnnnnnnnnnnnnnnnnnnnnnnnnnnnnnnnnnnnnnnnnnnnnnnnnnnnnnnnnnnnnnnnnnnnnnnnnnnnnnnnnnnnnnnnnnnnnnnnnnnnnnnnnnnnnnnnnnnnnnnnnnnnnnnnnnnnnnnnnnnnnnnnnnnnnnnnnnnnnnnnnnnnnnnnnnnnnnnnnnnnnnnnnnnnnnnnnnnnnnnnnnnnnnnnnnnnnnnnnnnnnnnnnnnnnnnnnnnnnnnnnnnnnnnnnnnnnnnnnnnnnnnnnnnnnnnnnnnnnnnnnnnnnnnnnnnnnnnnnnnnnnnnnnnnnnnnnnnnnnnnnnnnnnnnnnnnnnnnnnnnnnnnnnnnnnnnnnnnnnnnnnnnnnnnnnnnnnnnnnnnnnnnnnnnnnnnnnnnnnnnnnnnnnnnnnnnnnnnnnnnnnnnnnnnnnnnnnnnnnnnnnnnnnnnnnnnnnnnnnnnnnnnnnnnnnnnnnnnnnnnnnnnnnnnnnnnnnnnnnnnnnnnnnnnnnnnnnnnnnnnnnnnnnnnnnnnnnnnnnnnnnnnnnnnnnnnnnnnnnnnnnnnnnnnnnnnnnnnnnnnnnnnnnnnnnnnnnnnnnnnnnnnnnnnnnnnnnnnnnnnnnnnnnnnnnnnnnnnnnnnnnnnnnnnnnnnnnnnnnnnnnnnnnnnnnnnnnnnnnnnnnnnnnnnnnnnnnnnnnnnnnnnnnnnnnnnnnnnnnnnnnnnnnnnnnnnnnnnnnnnnnnnnnnnnnnnnnnnnnnnnnnnnnnnnnnnnnnnnnnnnnnnnnnnnnnnnnnnnnnnnnnnnnnnnnnnnnnnnnnnnnnnnnnnnnnnnnnnnnnnnnnnnnnnnnnnnnnnnnnnnnnnnnnnnnnnnnnnnnnnnnnnnnnnnnnnnnnnnnnnnnnnnnnnnnnnnnnnnnnnnnnnnnnnnnnnnnnnnnnnnnnnnnnnnnnnnnnnnnnnnnnnnnnnnnnnnnnnnnnnnnnnnnnnnnnnnnnnnnnnnnnnnnnnnnnnnnnnnnnnnnnnnnnnnnnnnnnnnnnnnnnnnnnnnnnnnnnnnnnnnnnnnnnnnnnnnnnnnnnnnnnnnnnnnnnnnnnnnnnnnnnnnnnnnnnnnnnnnnnnnnnnnnnnnnnnnnnnnnnnnnnnnnnnnnnnnnnnnnnnnnnnnnnnnnnnnnnnnnnnnnnnnnnnnnnnnnnnnnnnnnnnnnnnnnnnnnnnnnnnnnnnnnnnnnnnnnnnnnnnnnnnnnnnnnnnnnnnnnnnnnnnnnnnnnnnnnnnnnnnnnnnnnnnnnnnnnnnnnnnnnnnnnnnnnnnnnnnnnnnnnnnnnnnnnnnnnnnnnnnnnnnnnnnnnnnnnnnnnnnnnnnnnnnnnnnnnnnnnnnnnnnnnnnnnnnnnnnnnnnnnnnnnnnnnnnnnnnnnnnnnnnnnnnnnnnnnnnnnnnnnnnnnnnnnnnnnnnnnnnnnnnnnnnnnnnnnnnnnnnnnnnnnnnnnnnnnnnnnnnnnnnnnnnnnnnnnnnnnnnnnnnnnnnnnnnnnnnnnnnnnnnnnnnnnnnnnnnnnnnnnnnnnnnnnnnnnnnnnnnnnnnnnnnnnnnnnnnnnnnnnnnnnnnnnnnnnnnnnnnnnnnnnnnnnnnnnnnnnnnnnnnnnnnnnnnnnnnnnnnnnnnnnnnnnnnnnnnnnnnnnnnnnnnnnnnnnnnnnnnnnnnnnnnnnnnnnnnnnnnnnnnnnnnnnnnnnnnnnnnnnnnnnnnnnnnnnnnnnnnnnnnnnnnnnnnnnnnnnnnnnnnnnnnnnnnnnnnnnnnnnnnnnnnnnnnnnnnnnnnnnnnnnnnnnnnnnnnnnnnnnnnnnnnnnnnnnnnnnnnnnnnnnnnnnnnnnnnnnnnnnnnnnnnnnnnnnnnnnnnnnnnnnnnnnnnnnnnnnnnnnnnnnnnnnnnnnnnnnnnnnnnnnnnnnnnnnnnnnnnnnnnnnnnnnnnnnnnnnnnnnnnnnnnnnnnnnnnnnnnnnnnnnnnnnnnnnnnnnnnnnnnnnnnnnnnnnnnnnnnnnnnnnnnnnnnnnnnnnnnnnnnnnnnnnnnnnnnnnnnnnnnnnnnnnnnnnnnnnnnnnnnnnnnnnnnnnnnnnnnnnnnnnnnnnnnnnnnnnnnnnnnnnnnnnnnnnnnnnnnnnnnnnnnnnnnnnnnnnnnnnnnnnnnnnnnnnnnnnnnnnnnnnnnnnnnnnnnnnnnnnnnnnnnnnnnnnnnnnnnnnnnnnnnnnnnnnnnnnnnnnnnnnnnnnnnnnnnnnnnnnnnnnnnnnnnnnnnnnnnnnnnnnnnnnnnnnnnnnnnnnnnnnnnnnnnnnnnnnnnnnnnnnnnnnnnnnnnnnnnnnnnnnnnnnnnnnnnnnnnnnnnnnnnnnnnnnnnnnnnnnnnnnnnnnnnnnnnnnnnnnnnnnnnnnnnnnnnnnnnnnnnnnnnnnnnnnnnnnnnnnnnnnnnnnnnnnnnnnnnnnnnnnnnnnnnnnnnnnnnnnnnnnnnnnnnnnnnnnnnnnnnnnnnnnnnnnnnnnnnnnnnnnnnnnnnnnnnnnnnnnnnnnnnnnnnnnnnnnnnnnnnnnnnnnnnnnnnnnnnnnnnnnnnnnnnnnnnnnnnnnnnnnnnnnnnnnnnnnnnnnnnnnnnnnnnnnnnnnnnnnnnnnnnnnnnnnnnnnnnnnnnnnnnnnnnnnnnnnnnnnnnnnnnnnnnnnnnnnnnnnnnnnnnnnnnnnnnnnnnnnnnnnnnnnnnnnnnnnnnnnnnnnnnnnnnnnnnnnnnnnnnnnnnnnnnnnnnnnnnnnnnnnnnnnnnnnnnnnnnnnnnnnnnnnnnnnnnnnnnnnnnnnnnnnnnnnnnnnnnnnnnnnnnnnnnnnnnnnnnnnnnnnnnnnnnnnnnnnnnnnnnnnnnnnnnnnnnnnnnnnnnnnnnnnnnnnnnnnnnnnnnnnnnnnnnnnnnnnnnnnnnnnnnnnnnnnnnnnnnnnnnnnnnnnnnnnnnnnnnnnnnnnnnnnnnnnnnnnnnnnnnnnnnnnnnnnnnnnnnnnnnnnnnnnnnnnnnnnnnnnnnnnnnnnnnnnnnnnnnnnnnnnnnnnnnnnnnnnnnnnnnnnnnnnnnnnnnnnnnnnnnnnnnnnnnnnnnnnnnnnnnnnnnnnnnnnnnnnnnnnnnnnnnnnnnnnnnnnnnnnnnnnnnnnnnnnnnnnnnnnnnnnnnnnnnnnnnnnnnnnnnnnnnnnnnnnnnnnnnnnnnnnnnnnnnnnnnnnnnnnnnnnnnnnnnnnnnnnnnnnnnnnnnnnnnnnnnnnnnnnnnnnnnnnnnnnnnnnnnnnnnnnnnnnnnnnnnnnnnnnnnnnnnnnnnnnnnnnnnnnnnnnnnnnnnnnnnnnnnnnnnnnnnnnnnnnnnnnnnnnnnnnnnnnnnnnnnnnnnnnnnnnnnnnnnnnnnnnnnnnnnnnnnnnnnnnnnnnnnnnnnnnnnnnnnnnnnnnnnnnnnnnnnnnnnnnnnnnnnnnnnnnnnnnnnnnnnnnnnnnnnnnnnnnnnnnnnnnnnnnnnnnnnnnnnnnnnnnnnnnnnnnnnnnnnnnnnnnnnnnnnnnnnnnnnnnnnnnnnnnnnnnnnnnnnnnnnnnnnnnnnnnnnnnnnnnnnnnnnnnnnnnnnnnnnnnnnnnnnnnnnnnnnnnnnnnnnnnnnnnnnnnnnnnnnnnnnnnnnnnnnnnnnnnnnnnnnnnnnnnnnnnnnnnnnnnnnnnnnnnnnnnnnnnnnnnnnnnnnnnnnnnnnnnnnnnnnnnnnnnnnnnnnnnnnnnnnnnnnnnnnnnnnnnnnnnnnnnnnnnnnnnnnnnnnnnnnnnnnnnnnnnnnnnnnnnnnnnnnnnnnnnnnnnnnnnnnnnnnnnnnnnnnnnnnnnnnnnnnnnnnnnnnnnnnnnnnnnnnnnnnnnnnnnnnnnnnnnnnnnnnnnnnnnnnnnnnnnnnnnnnnnnnnnnnnnnnnnnnnnnnnnnnnnnnnnnnnnnnnnnnnnnnnnnnnnnnnnnnnnnnnnnnnnnnnnnnnnnnnnnnnnnnnnnnnnnnnnnnnnnnnnnnnnnnnnnnnnnnnnnnnnnnnnnnnnnnnnnnnnnnnnnnnnnnnnnnnnnnnnnnnnnnnnnnnnnnnnnnnnnnnnnnnnnnnnnnnnnnnnnnnnnnnnnnnnnnnnnnnnnnnnnnnnnnnnnnnnnnnnnnnnnnnnnnnnnnnnnnnnnnnnnnnnnnnnnnnnnnnnnnnnnnnnnnnnnnnnnnnnnnnnnnnnnnnnnnnnnnnnnnnnnnnnnnnnnnnnnnnnnnnnnnnnnnnnnnnnnnnnnnnnnnnnnnnnnnnnnnnnnnnnnnnnnnnnnnnnnnnnnnnnnnnnnnnnnnnnnnnnnnnnnnnnnnnnnnnnnnnnnnnnnnnnnnnnnnnnnnnnnnnnnnnnnnnnnnnnnnnnnnnnnnnnnnnnnnnnnnnnnnnnnnnnnnnnnnnnnnnnnnnnnnnnnnnnnnnnnnnnnnnnnnnnnnnnnnnnnnnnnnnnnnnnnnnnnnnnnnnnnnnnnnnnnnnnnnnnnnnnnnnnnnnnnnnnnnnnnnnnnnnnnnnnnnnnnnnnnnnnnnnnnnnnnnnnnnnnnnnnnnnnnnnnnnnnnnnnnnnnnnnnnnnnnnnnnnnnnnnnnnnnnnnnnnnnnnnnnnnnnnnnnnnnnnnnnnnnnnnnnnnnnnnnnnnnnnnnnnnnnnnnnnnnnnnnnnnnnnnnnnnnnnnnnnnnnnnnnnnnnnnnnnnnnnnnnnnnnnnnnnnnnnnnnnnnnnnnnnnnnnnnnnnnnnnnnnnnnnnnnnnnnnnnnnnnnnnnnnnnnnnnnnnnnnnnnnnnnnnnnnnnnnnnnnnnnnnnnnnnnnnnnnnnnnnnnnnnnnnnnnnnnnnnnnnnnnnnnnnnnnnnnnnnnnnnnnnnnnnnnnnnnnnnnnnnnnnnnnnnnnnnnnnnnnnnnnnnnnnnnnnnnnnnnnnnnnnnnnnnnnnnnnnnnnnnnnnnnnnnnnnnnnnnnnnnnnnnnnnnnnnnnnnnnnnnnnnnnnnnnnnnnnnnnnnnnnnnnnnnnnnnnnnnnnnnnnnnnnnnnnnnnnnnnnnnnnnnnnnnnnnnnnnnnnnnnnnnnnnnnnnnnnnnnnnnnnnnnnnnnnnnnnnnnnnnnnnnnnnnnnnnnnnnnnnnnnnnnnnnnnnnnnnnnnnnnnnnnnnnnnnnnnnnnnnnnnnnnnnnnnnnnnnnnnnnnnnnnnnnnnnnnnnnnnnnnnnnnnnnnnnnnnnnnnnnnnnnnnnnnnnnnnnnnnnnnnnnnnnnnnnnnnnnnnnnnnnnnnnnnnnnnnnnnnnnnnnnnnnnnnnnnnnnnnnnnnnnnnnnnnnnnnnnnnnnnnnnnnnnnnnnnnnnnnnnnnnnnnnnnnnnnnnnnnnnnnnnnnnnnnnnnnnnnnnnnnnnnnnnnnnnnnnnnnnnnnnnnnnnnnnnnnnnnnnnnnnnnnnnnnnnnnnnnnnnnnnnnnnnnnnnnnnnnnnnnnnnnnnnnnnnnnnnnnnnnnnnnnnnnnnnnnnnnnnnnnnnnnnnnnnnnnnnnnnnnnnnnnnnnnnnnnnnnnnnnnnnnnnnnnnnnnnnnnnnnnnnnnnnnnnnnnnnnnnnnnnnnnnnnnnnnnnnnnnnnnnnnnnnnnnnnnnnnnnnnnnnnnnnnnnnnnnnnnnnnnnnnnnnnnnnnnnnnnnnnnnnnnnnnnnnnnnnnnnnnnnnnnnnnnnnnnnnnnnnnnnnnnnnnnnnnnnnnnnnnnnnnnnnnnnnnnnnnnnnnnnnnnnnnnnnnnnnnnnnnnnnnnnnnnnnnnnnnnnnnnnnnnnnnnnnnnnnnnnnnnnnnnnnnnnnnnnnnnnnnnnnnnnnnnnnnnnnnnnnnnnnnnnnnnnnnnnnnnnnnnnnnnnnnnnnnnnnnnnnnnnnnnnnnnnnnnnnnnnnnnnnnnnnnnnnnnnnnnnnnnnnnnnnnnnnnnnnnnnnnnnnnnnnnnnnnnnnnnnnnnnnnnnnnnnnnnnnnnnnnnnnnnnnnnnnnnnnnnnnnnnnnnnnnnnnnnnnnnnnnnnnnnnnnnnnnnnnnnnnnnnnnnnnnnnnnnnnnnnnnnnnnnnnnnnnnnnnnnnnnnnnnnnnnnnnnnnnnnnnnnnnnnnnnnnnnnnnnnnnnnnnnnnnnnnnnnnnnnnnnnnnnnnnnnnnnnnnnnnnnnnnnnnnnnnnnnnnnnnnnnnnnnnnnnnnnnnnnnnnnnnnnnnnnnnnnnnnnnnnnnnnnnnnnnnnnnnnnnnnnnnnnnnnnnnnnnnnnnnnnnnnnnnnnnnnnnnnnnnnnnnnnnnnnnnnnnnnnnnnnnnnnnnnnnnnnnnnnnnnnnnnnnnnnnnnnnnnnnnnnnnnnnnnnnnnnnnnnnnnnnnnnnnnnnnnnnnnnnnnnnnnnnnnnnnnnnnnnnnnnnnnnnnnnnnnnnnnnnnnnnnnnnnnnnnnnnnnnnnnnnnnnnnnnnnnnnnnnnnnnnnnnnnnnnnnnnnnnnnnnnnnnnnnnnnnnnnnnnnnnnnnnnnnnnnnnnnnnnnnnnnnnnnnnnnnnnnnnnnnnnnnnnnnnnnnnnnnnnnnnnnnnnnnnnnnnnnnnnnnnnnnnnnnnnnnnnnnnnnnnnnnnnnnnnnnnnnnnnnnnnnnnnnnnnnnnnnnnnnnnnnnnnnnnnnnnnnnnnnnnnnnnnnnnnnnnnnnnnnnnnnnnnnnnnnnnnnnnnnnnnnnnnnnnnnnnnnnnnnnnnnnnnnnnnnnnnnnnnnnnnnnnnnnnnnnnnnnnnnnnnnnnnnnnnnnnnnnnnnnnnnnnnnnnnnnnnnnnnnnnnnnnnnnnnnnnnnnnnnnnnnnnnnnnnnnnnnnnnnnnnnnnnnnnnnnnnnnnnnnnnnnnnnnnnnnnnnnnnnnnnnnnnnnnnnnnnnnnnnnnnnnnnnnnnnnnnnnnnnnnnnnnnnnnnnnnnnnnnnnnnnnnnnnnnnnnnnnnnnnnnnnnnnnnnnnnnnnnnnnnnnnnnnnnnnnnnnnnnnnnnnnnnnnnnnnnnnnnnnnnnnnnnnnnnnnnnnnnnnnnnnnnnnnnnnnnnnnnnnnnnnnnnnnnnnnnnnnnnnnnnnnnnnnnnnnnnnnnnnnnnnnnnnnnnnnnnnnnnnnnnnnnnnnnnnnnnnnnnnnnnnnnnnnnnnnnnnnnnnnnnnnnnnnnnnnnnnnnnnnnnnnnnnnnnnnnnnnnnnnnnnnnnnnnnnnnnnnnnnnnnnnnnnnnnnnnnnnnnnnnnnnnnnnnnnnnnnnnnnnnnnnnnnnnnnnnnnnnnnnnnnnnnnnnnnnnnnnnnnnnnnnnnnnnnnnnnnnnnnnnnnnnnnnnnnnnnnnnnnnnnnnnnnnnnnnnnnnnnnnnnnnnnnnnnnnnnnnnnnnnnnnnnnnnnnnnnnnnnnnnnnnnnnnnnnnnnnnnnnnnnnnnnnnnnnnnnnnnnnnnnnnnnnnnnnnnnnnnnnnnnnnnnnnnnnnnnnnnnnnnnnnnnnnnnnnnnnnnnnnnnnnnnnnnnnnnnnnnnnnnnnnnnnnnnnnnnnnnnnnnnnnnnnnnnnnnnnnnnnnnnnnnnnnnnnnnnnnnnnnnnnnnnnnnnnnnnnnnnnnnnnnnnnnnnnnnnnnnnnnnnnnnnnnnnnnnnnnnnnnnnnnnnnnnnnnnnnnnnnnnnnnnnnnnnnnnnnnnnnnnnnnnnnnnnnnnnnnnnnnnnnnnnnnnnnnnnnnnnnnnnnnnnnnnnnnnnnnnnnnnnnnnnnnnnnnnnnnnnnnnnnnnnnnnnnnnnnnnnnnnnnnnnnnnnnnnnnnnnnnnnnnnnnnnnnnnnnnnnnnnnnnnnnnnnnnnnnnnnnnnnnnnnnnnnnnnnnnnnnnnnnnnnnnnnnnnnnnnnnnnnnnnnnnnnnnnnnnnnnnnnnnnnnnnnnnnnnnnnnnnnnnnnnnnnnnnnnnnnnnnnnnnnnnnnnnnnnnnnnnnnnnnnnnnnnnnnnnnnnnnnnnnnnnnnnnnnnnnnnnnnnnnnnnnnnnnnnnnnnnnnnnnnnnnnnnnnnnnnnnnnnnnnnnnnnnnnnnnnnnnnnnnnnnnnnnnnnnnnnnnnnnnnnnnnnnnnnnnnnnnnnnnnnnnnnnnnnnnnnnnnnnnnnnnnnnnnnnnnnnnnnnnnnnnnnnnnnnnnnnnnnnnnnnnnnnnnnnnnnnnnnnnnnnnnnnnnnnnnnnnnnnnnnnnnnnnnnnnnnnnnnnnnnnnnnnnnnnnnnnnnnnnnnnnnnnnnnnnnnnnnnnnnnnnnnnnnnnnnnnnnnnnnnnnnnnnnnnnnnnnnnnnnnnnnnnnnnnnnnnnnnnnnnnnnnnnnnnnnnnnnnnnnnnnnnnnnnnnnnnnnnnnnnnnnnnnnnnnnnnnnnnnnnnnnnnnnnnnnnnnnnnnnnnnnnnnnnnnnnnnnnnnnnnnnnnnnnnnnnnnnnnnnnnnnnnnnnnnnnnnnnnnnnnnnnnnnnnnnnnnnnnnnnnnnnnnnnnnnnnnnnnnnnnnnnnnnnnnnnnnnnnnnnnnnnnnnnnnnnnnnnnnnnnnnnnnnnnnnnnnnnnnnnnnnnnnnnnnnnnnnnnnnnnnnnnnnnnnnnnnnnnnnnnnnnnnnnnnnnnnnnnnnnnnnnnnnnnnnnnnnnnnnnnnnnnnnnnnnnnnnnnnnnnnnnnnnnnnnnnnnnnnnnnnnnnnnnnnnnnnnnnnnnnnnnnnnnnnnnnnnnnnnnnnnnnnnnnnnnnnnnnnnnnnnnnnnnnnnnnnnnnnnnnnnnnnnnnnnnnnnnnnnnnnnnnnnnnnnnnnnnnnnnnnnnnnnnnnnnnnnnnnnnnnnnnnnnnnnnnnnnnnnnnnnnnnnnnnnnnnnnnnnnnnnnnnnnnnnnnnnnnnnnnnnnnnnnnnnnnnnnnnnnnnnnnnnnnnnnnnnnnnnnnnnnnnnnnnnnnnnnnnnnnnnnnnnnnnnnnnnnnnnnnnnnnnnnnnnnnnnnnnnnnnnnnnnnnnnnnnnnnnnnnnnnnnnnnnnnnnnnnnnnnnnnnnnnnnnnnnnnnnnnnnnnnnnnnnnnnnnnnnnnnnnnnnnnnnnnnnnnnnnnnnnnnnnnnnnnnnnnnnnnnnnnnnnnnnnnnnnnnnnnnnnnnnnnnnnnnnnnnnnnnnnnnnnnnnnnnnnnnnnnnnnnnnnnnnnnnnnnnnnnnnnnnnnnnnnnnnnnnnnnnnnnnnnnnnnnnnnnnnnnnnnnnnnnnnnnnnnnnnnnnnnnnnnnnnnnnnnnnnnnnnnnnnnnnnnnnnnnnnnnnnnnnnnnnnnnnnnnnnnnnnnnnnnnnnnnnnnnnnnnnnnnnnnnnnnnnnnnnnnnnnnnnnnnnnnnnnnnnnnnnnnnnnnnnnnnnnnnnnnnnnnnnnnnnnnnnnnnnnnnnnnnnnnnnnnnnnnnnnnnnnnnnnnnnnnnnnnnnnnnnnnnnnnnnnnnnnnnnnnnnnnnnnnnnnnnnnnnnnnnnnnnnnnnnnnnnnnnnnnnnnnnnnnnnnnnnnnnnnnnnnnnnnnnnnnnnnnnnnnnnnnnnnnnnnnnnnnnnnnnnnnnnnnnnnnnnnnnnnnnnnnnnnnnnnnnnnnnnnnnnnnnnnnnnnnnnnnnnnnnnnnnnnnnnnnnnnnnnnnnnnnnnnnnnnnnnnnnnnnnnnnnnnnnnnnnnnnnnnnnnnnnnnnnnnnnnnnnnnnnnnnnnnnnnnnnnnnnnnnnnnnnnnnnnnnnnnnnnnnnnnnnnnnnnnnnnnnnnnnnnnnnnnnnnnnnnnnnnnnnnnnnnnnnnnnnnnnnnnnnnnnnnnnnnnnnnnnnnnnnnnnnnnnnnnnnnnnnnnnnnnnnnnnnnnnnnnnnnnnnnnnnnnnnnnnnnnnnnnnnnnnnnnnnnnnnnnnnnnnnnnnnnnnnnnnnnnnnnnnnnnnnnnnnnnnnnnnnnnnnnnnnnnnnnnnnnnnnnnnnnnnnnnnnnnnnnnnnnnnnnnnnnnnnnnnnnnnnnnnnnnnnnnnnnnnnnnnnnnnnnnnnnnnnnnnnnnnnnnnnnnnnnnnnnnnnnnnnnnnnnnnnnnnnnnnnnnnnnnnnnnnnnnnnnnnnnnnnnnnnnnnnnnnnnnnnnnnnnnnnnnnnnnnnnnnnnnnnnnnnnnnnnnnnnnnnnnnnnnnnnnnnnnnnnnnnnnnnnnnnnnnnnnnnnnnnnnnnnnnnnnnnnnnnnnnnnnnnnnnnnnnnnnnnnnnnnnnnnnnnnnnnnnnnnnnnnnnnnnnnnnnnnnnnnnnnnnnnnnnnnnnnnnnnnnnnnnnnnnnnnnnnnnnnnnnnnnnnnnnnnnnnnnnnnnnnnnnnnnnnnnnnnnnnnnnnnnnnnnnnnnnnnnnnnnnnnnnnnnnnnnnnnnnnnnnnnnnnnnnnnnnnnnnnnnnnnnnnnnnnnnnnnnnnnnnnnnnnnnnnnnnnnnnnnnnnnnnnnnnnnnnnnnnnnnnnnnnnnnnnnnnnnnnnnnnnnnnnnnnnnnnnnnnnnnnnnnnnnnnnnnnnnnnnnnnnnnnnnnnnnnnnnnnnnnnnnnnnnnnnnnnnnnnnnnnnnnnnnnnnnnnnnnnnnnnnnnnnnnnnnnnnnnnnnnnnnnnnnnnnnnnnnnnnnnnnnnnnnnnnnnnnnnnnnnnnnnnnnnnnnnnnnnnnnnnnnnnnnnnnnnnnnnnnnnnnnnnnnnnnnnnnnnnnnnnnnnnnnnnnnnnnnnnnnnnnnnnnnnnnnnnnnnnnnnnnnnnnnnnnnnnnnnnnnnnnnnnnnnnnnnnnnnnnnnnnnnnnnnnnnnnnnnnnnnnnnnnnnnnnnnnnnnnnnnnnnnnnnnnnnnnnnnnnnnnnnnnnnnnnnnnnnnnnnnnnnnnnnnnnnnnnnnnnnnnnnnnnnnnnnnnnnnnnnnnnnnnnnnnnnnnnnnnnnnnnnnnnnnnnnnnnnnnnnnnnnnnnnnnnnnnnnnnnnnnnnnnnnnnnnnnnnnnnnnnnnnnnnnnnnnnnnnnnnnnnnnnnnnnnnnnnnnnnnnnnnnnnnnnnnnnnnnnnnnnnnnnnnnnnnnnnnnnnnnnnnnnnnnnnnnnnnnnnnnnnnnnnnnnnnnnnnnnnnnnnnnnnnnnnnnnnnnnnnnnnnnnnnnnnnnnnnnnnnnnnnnnnnnnnnnnnnnnnnnnnnnnnnnnnnnnnnnnnnnnnnnnnnnnnnnnnnnnnnnnnnnnnnnnnnnnnnnnnnnnnnnnnnnnnnnnnnnnnnnnnnnnnnnnnnnnnnnnnnnnnnnnnnnnnnnnnnnnnnnnnnnnnnnnnnnnnnnnnnnnnnnnnnnnnnnnnnnnnnnnnnnnnnnnnnnnnnnnnnnnnnnnnnnnnnnnnnnnnnnnnnnnnnnnnnnnnnnnnnnnnnnnnnnnnnnnnnnnnnnnnnnnnnnnnnnnnnnnnnnnnnnnnnnnnnnnnnnnnnnnnnnnnnnnnnnnnnnnnnnnnnnnnnnnnnnnnnnnnnnnnnnnnnnnnnnnnnnnnnnnnnnnnnnnnnnnnnnnnnnnnnnnnnnnnnnnnnnnnnnnnnnnnnnnnnnnnnnnnnnnnnnnnnnnnnnnnnnnnnnnnnnnnnnnnnnnnnnnnnnnnnnnnnnnnnnnnnnnnnnnnnnnnnnnnnnnnnnnnnnnnnnnnnnnnnnnnnnnnnnnnnnnnnnnnnnnnnnnnnnnnnnnnnnnnnnnnnnnnnnnnnnnnnnnnnnnnnnnnnnnnnnnnnnnnnnnnnnnnnnnnnnnnnnnnnnnnnnnnnnnnnnnnnnnnnnnnnnnnnnnnnnnnnnnnnnnnnnnnnnnnnnnnnnnnnnnnnnnnnnnnnnnnnnnnnnnnnnnnnnnnnnnnnnnnnnnnnnnnnnnnnnnnnnnnnnnnnnnnnnnnnnnnnnnnnnnnnnnnnnnnnnnnnnnnnnnnnnnnnnnnnnnnnnnnnnnnnnnnnnnnnnnnnnnnnnnnnnnnnnnnnnnnnnnnnnnnnnnnnnnnnnnnnnnnnnnnnnnnnnnnnnnnnnnnnnnnnnnnnnnnnnnnnnnnnnnnnnnnnnnnnnnnnnnnnnnnnnnnnnnnnnnnnnnnnnnnnnnnnnnnnnnnnnnnnnnnnnnnnnnnnnnnnnnnnnnnnnnnnnnnnnnnnnnnnnnnnnnnnnnnnnnnnnnnnnnnnnnnnnnnnnnnnnnnnnnnnnnnnnnnnnnnnnnnnnnnnnnnnnnnnnnnnnnnnnnnnnnnnnnnnnnnnnnnnnnnnnnnnnnnnnnnnnnnnnnnnnnnnnnnnnnnnnnnnnnnnnnnnnnnnnnnnnnnnnnnnnnnnnnnnnnnnnnnnnnnnnnnnnnnnnnnnnnnnnnnnnnnnnnnnnnnnnnnnnnnnnnnnnnnnnnnnnnnnnnnnnnnnnnnnnnnnnnnnnnnnnnnnnnnnnnnnnnnnnnnnnnnnnnnnnnnnnnnnnnnnnnnnnnnnnnnnnnnnnnnnnnnnnnnnnnnnnnnnnnnnnnnnnnnnnnnnnnnnnnnnnnnnnnnnnnnnnnnnnnnnnnnnnnnnnnnnnnnnnnnnnnnnnnnnnnnnnnnnnnnnnnnnnnnnnnnnnnnnnnnnnnnnnnnnnnnnnnnnnnnnnnnnnnnnnnnnnnnnnnnnnnnnnnnnnnnnnnnnnnnnnnnnnnnnnnnnnnnnnnnnnnnnnnnnnnnnnnnnnnnnnnnnnnnnnnnnnnnnnnnnnnnnnnnnnnnnnnnnnnnnnnnnnnnnnnnnnnnnnnnnnnnnnnnnnnnnnnnnnnnnnnnnnnnnnnnnnnnnnnnnnnnnnnnnnnnnnnnnnnnnnnnnnnnnnnnnnnnnnnnnnnnnnnnnnnnnnnnnnnnnnnnnnnnnnnnnnnnnnnnnnnnnnnnnnnnnnnnnnnnnnnnnnnnnnnnnnnnnnnnnnnnnnnnnnnnnnnnnnnnnnnnnnnnnnnnnnnnnnnnnnnnnnnnnnnnnnnnnnnnnnnnnnnnnnnnnnnnnnnnnnnnnnnnnnnnnnnnnnnnnnnnnnnnnnnnnnnnnnnnnnnnnnnnnnnnnnnnnnnnnnnnnnnnnnnnnnnnnnnnnnnnnnnnnnnnnnnnnnnnnnnnnnnnnnnnnnnnnnnnnnnnnnnnnnnnnnnnnnnnnnnnnnnnnnnnnnnnnnnnnnnnnnnnnnnnnnnnnnnnnnnnnnnnnnnnnnnnnnnnnnnnnnnnnnnnnnnnnnnnnnnnnnnnnnnnnnnnnnnnnnnnnnnnnnnnnnnnnnnnnnnnnnnnnnnnnnnnnnnnnnnnnnnnnnnnnnnnnnnnnnnnnnnnnnnnnnnnnnnnnnnnnnnnnnnnnnnnnnnnnnnnnnnnnnnnnnnnnnnnnnnnnnnnnnnnnnnnnnnnnnnnnnnnnnnnnnnnnnnnnnnnnnnnnnnnnnnnnnnnnnnnnnnnnnnnnnnnnnnnnnnnnnnnnnnnnnnnnnnnnnnnnnnnnnnnnnnnnnnnnnnnnnnnnnnnnnnnnnnnnnnnnnnnnnnnnnnnnnnnnnnnnnnnnnnnnnnnnnnnnnnnnnnnnnnnnnnnnnnnnnnnnnnnnnnnnnnnnnnnnnnnnnnnnnnnnnnnnnnnnnnnnnnnnnnnnnnnnnnnnnnnnnnnnnnnnnnnnnnnnnnnnnnnnnnnnnnnnnnnnnnnnnnnnnnnnnnnnnnnnnnnnnnnnnnnnnnnnnnnnnnnnnnnnnnnnnnnnnnnnnnnnnnnnnnnnnnnnnnnnnnnnnnnnnnnnnnnnnnnnnnnnnnnnnnnnnnnnnnnnnnnnnnnnnnnnnnnnnnnnnnnnnnnnnnnnnnnnnnnnnnnnnnnnnnnnnnnnnnnnnnnnnnnnnnnnnnnnnnnnnnnnnnnnnnnnnnnnnnnnnnnnnnnnnnnnnnnnnnnnnnnnnnnnnnnnnnnnnnnnnnnnnnnnnnnnnnnnnnnnnnnnnnnnnnnnnnnnnnnnnnnnnnnnnnnnnnnnnnnnnnnnnnnnnnnnnnnnnnnnnnnnnnnnnnnnnnnnnnnnnnnnnnnnnnnnnnnnnnnnnnnnnnnnnnnnnnnnnnnnnnnnnnnnnnnnnnnnnnnnnnnnnnnnnnnnnnnnnnnnnnnnnnnnnnnnnnnnnnnnnnnnnnnnnnnnnnnnnnnnnnnnnnnnnnnnnnnnnnnnnnnnnnnnnnnnnnnnnnnnnnnnnnnnnnnnnnnnnnnnnnnnnnnnnnnnnnnnnnnnnnnnnnnnnnnnnnnnnnnnnnnnnnnnnnnnnnnnnnnnnnnnnnnnnnnnnnnnnnnnnnnnnnnnnnnnnnnnnnnnnnnnnnnnnnnnnnnnnnnnnnnnnnnnnnnnnnnnnnnnnnnnnnnnnnnnnnnnnnnnnnnnnnnnnnnnnnnnnnnnnnnnnnnnnnnnnnnnnnnnnnnnnnnnnnnnnnnnnnnnnnnnnnnnnnnnnnnnnnnnnnnnnnnnnnnnnnnnnnnnnnnnnnnnnnnnnnnnnnnnnnnnnnnnnnnnnnnnnnnnnnnnnnnnnnnnnnnnnnnnnnnnnnnnnnnnnnnnnnnnnnnnnnnnnnnnnnnnnnnnnnnnnnnnnnnnnnnnnnnnnnnnnnnnnnnnnnnnnnnnnnnnnnnnnnnnnnnnnnnnnnnnnnnnnnnnnnnnnnnnnnnnnnnnnnnnnnnnnnnnnnnnnnnnnnnnnnnnnnnnnnnnnnnnnnnnnnnnnnnnnnnnnnnnnnnnnnnnnnnnnnnnnnnnnnnnnnnnnnnnnnnnnnnnnnnnnnnnnnnnnnnnnnnnnnnnnnnnnnnnnnnnnnnnnnnnnnnnnnnnnnnnnnnnnnnnnnnnnnnnnnnnnnnnnnnnnnnnnnnnnnnnnnnnnnnnnnnnnnnnnnnnnnnnnnnnnnnnnnnnnnnnnnnnnnnnnnnnnnnnnnnnnnnnnnnnnnnnnnnnnnnnnnnnnnnnnnnnnnnnnnnnnnnnnnnnnnnnnnnnnnnnnnnnnnnnnnnnnnnnnnnnnnnnnnnnnnnnnnnnnnnnnnnnnnnnnnnnnnnnnnnnnnnnnnnnnnnnnnnnnnnnnnnnnnnnnnnnnnnnnnnnnnnnnnnnnnnnnnnnnnnnnnnnnnnnnnnnnnnnnnnnnnnnnnnnnnnnnnnnnnnnnnnnnnnnnnnnnnnnnnnnnnnnnnnnnnnnnnnnnnnnnnnnnnnnnnnnnnnnnnnnnnnnnnnnnnnnnnnnnnnnnnnnnnnnnnnnnnnnnnnnnnnnnnnnnnnnnnnnnnnnnnnnnnnnnnnnnnnnnnnnnnnnnnnnnnnnnnnnnnnnnnnnnnnnnnnnnnnnnnnnnnnnnnnnnnnnnnnnnnnnnnnnnnnnnnnnnnnnnnnnnnnnnnnnnnnnnnnnnnnnnnnnnnnnnnnnnnnnnnnnnnnnnnnnnnnnnnnnnnnnnnnnnnnnnnnnnnnnnnnnnnnnnnnnnnnnnnnnnnnnnnnnnnnnnnnnnnnnnnnnnnnnnnnnnnnnnnnnnnnnnnnnnnnnnnnnnnnnnnnnnnnnnnnnnnnnnnnnnnnnnnnnnnnnnnnnnnnnnnnnnnnnnnnnnnnnnnnnnnnnnnnnnnnnnnnnnnnnnnnnnnnnnnnnnnnnnnnnnnnnnnnnnnnnnnnnnnnnnnnnnnnnnnnnnnnnnnnnnnnnnnnnnnnnnnnnnnnnnnnnnnnnnnnnnnnnnnnnnnnnnnnnnnnnnnnnnnnnnnnnnnnnnnnnnnnnnnnnnnnnnnnnnnnnnnnnnnnnnnnnnnnnnnnnnnnnnnnnnnnnnnnnnnnnnnnnnnnnnnnnnnnnnnnnnnnnnnnnnnnnnnnnnnnnnnnnnnnnnnnnnnnnnnnnnnnnnnnnnnnnnnnnnnnnnnnnnnnnnnnnnnnnnnnnnnnnnnnnnnnnnnnnnnnnnnnnnnnnnnnnnnnnnnnnnnnnnnnnnnnnnnnnnnnnnnnnnnnnnnnnnnnnnnnnnnnnnnnnnnnnnnnnnnnnnnnnnnnnnnnnnnnnnnnnnnnnnnnnnnnnnnnnnnnnnnnnnnnnnnnnnnnnnnnnnnnnnnnnnnnnnnnnnnnnnnnnnnnnnnnnnnnnnnnnnnnnnnnnnnnnnnnnnnnnnnnnnnnnnnnnnnnnnnnnnnnnnnnnnnnnnnnnnnnnnnnnnnnnnnnnnnnnnnnnnnnnnnnnnnnnnnnnnnnnnnnnnnnnnnnnnnnnnnnnnnnnnnnnnnnnnnnnnnnnnnnnnnnnnnnnnnnnnnnnnnnnnnnnnnnnnnnnnnnnnnnnnnnnnnnnnnnnnnnnnnnnnnnnnnnnnnnnnnnnnnnnnnnnnnnnnnnnnnnnnnnnnnnnnnnnnnnnnnnnnnnnnnnnnnnnnnnnnnnnnnnnnnnnnnnnnnnnnnnnnnnnnnnnnnnnnnnnnnnnnnnnnnnnnnnnnnnnnnnnnnnnnnnnnnnnnnnnnnnnnnnnnnnnnnnnnnnnnnnnnnnnnnnnnnnnnnnnnnnnnnnnnnnnnnnnnnnnnnnnnnnnnnnnnnnnnnnnnnnnnnnnnnnnnnnnnnnnnnnnnnnnnnnnnnnnnnnnnnnnnnnnnnnnnnnnnnnnnnnnnnnnnnnnnnnnnnnnnnnnnnnnnnnnnnnnnnnnnnnnnnnnnnnnnnnnnnnnnnnnnnnnnnnnnnnnnnnnnnnnnnnnnnnnnnnnnnnnnnnnnnnnnnnnnnnnnnnnnnnnnnnnnnnnnnnnnnnnnnnnnnnnnnnnnnnnnnnnnnnnnnnnnnnnnnnnnnnnnnnnnnnnnnnnnnnnnnnnnnnnnnnnnnnnnnnnnnnnnnnnnnnnnnnnnnnnnnnnnnnnnnnnnnnnnnnnnnnnnnnnnnnnnnnnnnnnnnnnnnnnnnnnnnnnnnnnnnnnnnnnnnnnnnnnnnnnnnnnnnnnnnnnnnnnnnnnnnnnnnnnnnnnnnnnnnnnnnnnnnnnnnnnnnnnnnnnnnnnnnnnnnnnnnnnnnnnnnnnnnnnnnnnnnnnnnnnnnnnnnnnnnnnnnnnnnnnnnnnnnnnnnnnnnnnnnnnnnnnnnnnnnnnnnnnnnnnnnnnnnnnnnnnnnnnnnnnnnnnnnnnnnnnnnnnnnnnnnnnnnnnnnnnnnnnnnnnnnnnnnnnnnnnnnnnnnnnnnnnnnnnnnnnnnnnnnnnnnnnnnnnnnnnnnnnnnnnnnnnnnnnnnnnnnnnnnnnnnnnnnnnnnnnnnnnnnnnnnnnnnnnnnnnnnnnnnnnnnnnnnnnnnnnnnnnnnnnnnnnnnnnnnnnnnnnnnnnnnnnnnnnnnnnnnnnnnnnnnnnnnnnnnnnnnnnnnnnnnnnnnnnnnnnnnnnnnnnnnnnnnnnnnnnnnnnnnnnnnnnnnnnnnnnnnnnnnnnnnnnnnnnnnnnnnnnnnnnnnnnnnnnnnnnnnnnnnnnnnnnnnnnnnnnnnnnnnnnnnnnnnnnnnnnnnnnnnnnnnnnnnnnnnnnnnnnnnnnnnnnnnnnnnnnnnnnnnnnnnnnnnnnnnnnnnnnnnnnnnnnnnnnnnnnnnnnnnnnnnnnnnnnnnnnnnnnnnnnnnnnnnnnnnnnnnnnnnnnnnnnnnnnnnnnnnnnnnnnnnnnnnnnnnnnnnnnnnnnnnnnnnnnnnnnnnnnnnnnnnnnnnnnnnnnnnnnnnnnnnnnnnnnnnnnnnnnnnnnnnnnnnnnnnnnnnnnnnnnnnnnnnnnnnnnnnnnnnnnnnnnnnnnnnnnnnnnnnnnnnnnnnnnnnnnnnnnnnnnnnnnnnnnnnnnnnnnnnnnnnnnnnnnnnnnnnnnnnnnnnnnnnnnnnnnnnnnnnnnnnnnnnnnnnnnnnnnnnnnnnnnnnnnnnnnnnnnnnnnnnnnnnnnnnnnnnnnnnnnnnnnnnnnnnnnnnnnnnnnnnnnnnnnnnnnnnnnnnnnnnnnnnnnnnnnnnnnnnnnnnnnnnnnnnnnnnnnnnnnnnnnnnnnnnnnnnnnnnnnnnnnnnnnnnnnnnnnnnnnnnnnnnnnnnnnnnnnnnnnnnnnnnnnnnnnnnnnnnnnnnnnnnnnnnnnnnnnnnnnnnnnnnnnnnnnnnnnnnnnnnnnnnnnnnnnnnnnnnnnnnnnnnnnnnnnnnnnnnnnnnnnnnnnnnnnnnnnnnnnnnnnnnnnnnnnnnnnnnnnnnnnnnnnnnnnnnnnnnnnnnnnnnnnnnnnnnnnnnnnnnnnnnnnnnnnnnnnnnnnnnnnnnnnnnnnnnnnnnnnnnnnnnnnnnnnnnnnnnnnnnnnnnnnnnnnnnnnnnnnnnnnnnnnnnnnnnnnnnnnnnnnnnnnnnnnnnnnnnnnnnnnnnnnnnnnnnnnnnnnnnnnnnnnnnnnnnnnnnnnnnnnnnnnnnnnnnnnnnnnnnnnnnnnnnnnnnnnnnnnnnnnnnnnnnnnnnnnnnnnnnnnnnnnnnnnnnnnnnnnnnnnnnnnnnnnnnnnnnnnnnnnnnnnnnnnnnnnnnnnnnnnnnnnnnnnnnnnnnnnnnnnnnnnnnnnnnnnnnnnnnnnnnnnnnnnnnnnnnnnnnnnnnnnnnnnnnnnnnnnnnnnnnnnnnnnnnnnnnnnnnnnnnnnnnnnnnnnnnnnnnnnnnnnnnnnnnnnnnnnnnnnnnnnnnnnnnnnnnnnnnnnnnnnnnnnnnnnnnnnnnnnnnnnnnnnnnnnnnnnnnnnnnnnnnnnnnnnnnnnnnnnnnnnnnnnnnnnnnnnnnnnnnnnnnnnnnnnnnnnnnnnnnnnnnnnnnnnnnnnnnnnnnnnnnnnnnnnnnnnnnnnnnnnnnnnnnnnnnnnnnnnnnnnnnnnnnnnnnnnnnnnnnnnnnnnnnnnnnnnnnnnnnnnnnnnnnnnnnnnnnnnnnnnnnnnnnnnnnnnnnnnnnnnnnnnnnnnnnnnnnnnnnnnnnnnnnnnnnnnnnnnnnnnnnnnnnnnnnnnnnnnnnnnnnnnnnnnnnnnnnnnnnnnnnnnnnnnnnnnnnnnnnnnnnnnnnnnnnnnnnnnnnnnnnnnnnnnnnnnnnnnnnnnnnnnnnnnnnnnnnnnnnnnnnnnnnnnnnnnnnnnnnnnnnnnnnnnnnnnnnnnnnnnnnnnnnnnnnnnnnnnnnnnnnnnnnnnnnnnnnnnnnnnnnnnnnnnnnnnnnnnnnnnnnnnnnnnnnnnnnnnnnnnnnnnnnnnnnnnnnnnnnnnnnnnnnnnnnnnnnnnnnnnnnnnnnnnnnnnnnnnnnnnnnnnnnnnnnnnnnnnnnnnnnnnnnnnnnnnnnnnnnnnnnnnnnnnnnnnnnnnnnnnnnnnnnnnnnnnnnnnnnnnnnnnnnnnnnnnnnnnnnnnnnnnnnnnnnnnnnnnnnnnnnnnnnnnnnnnnnnnnnnnnnnnnnnnnnnnnnnnnnnnnnnnnnnnnnnnnnnnnnnnnnnnnnnnnnnnnnnnnnnnnnnnnnnnnnnnnnnnnnnnnnnnnnnnnnnnnnnnnnnnnnnnnnnnnnnnnnnnnnnnnnnnnnnnnnnnnnnnnnnnnnnnnnnnnnnnnnnnnnnnnnnnnnnnnnnnnnnnnnnnnnnnnnnnnnnnnnnnnnnnnnnnnnnnnnnnnnnnnnnnnnnnnnnnnnnnnnnnnnnnnnnnnnnnnnnnnnnnnnnnnnnnnnnnnnnnnnnnnnnnnnnnnnnnnnnnnnnnnnnnnnnnnnnnnnnnnnnnnnnnnnnnnnnnnnnnnnnnnnnnnnnnnnnnnnnnnnnnnnnnnnnnnnnnnnnnnnnnnnnnnnnnnnnnnnnnnnnnnnnnnnnnnnnnnnnnnnnnnnnnnnnnnnnnnnnnnnnnnnnnnnnnnnnnnnnnnnnnnnnnnnnnnnnnnnnnnnnnnnnnnnnnnnnnnnnnnnnnnnnnnnnnnnnnnnnnnnnnnnnnnnnnnnnnnnnnnnnnnnnnnnnnnnnnnnnnnnnnnnnnnnnnnnnnnnnnnnnnnnnnnnnnnnnnnnnnnnnnnnnnnnnnnnnnnnnnnnnnnnnnnnnnnnnnnnnnnnnnnnnnnnnnnnnnnnnnnnnnnnnnnnnnnnnnnnnnnnnnnnnnnnnnnnnnnnnnnnnnnnnnnnnnnnnnnnnnnnnnnnnnnnnnnnnnnnnnnnnnnnnnnnnnnnnnnnnnnnnnnnnnnnnnnnnnnnnnnnnnnnnnnnnnnnnnnnnnnnnnnnnnnnnnnnnnnnnnnnnnnnnnnnnnnnnnnnnnnnnnnnnnnnnnnnnnnnnnnnnnnnnnnnnnnnnnnnnnnnnnnnnnnnnnnnnnnnnnnnnnnnnnnnnnnnnnnnnnnnnnnnnnnnnnnnnnnnnnnnnnnnnnnnnnnnnnnnnnnnnnnnnnnnnnnnnnnnnnnnnnnnnnnnnnnnnnnnnnnnnnnnnnnnnnnnnnnnnnnnnnnnnnnnnnnnnnnnnnnnnnnnnnnnnnnnnnnnnnnnnnnnnnnnnnnnnnnnnnnnnnnnnnnnnnnnnnnnnnnnnnnnnnnnnnnnnnnnnnnnnnnnnnnnnnnnnnnnnnnnnnnnnnnnnnnnnnnnnnnnnnnnnnnnnnnnnnnnnnnnnnnnnnnnnnnnnnnnnnnnnnnnnnnnnnnnnnnnnnnnnnnnnnnnnnnnnnnnnnnnnnnnnnnnnnnnnnnnnnnnnnnnnnnnnnnnnnnnnnnnnnnnnnnnnnnnnnnnnnnnnnnnnnnnnnnnnnnnnnnnnnnnnnnnnnnnnnnnnnnnnnnnnnnnnnnnnnnnnnnnnnnnnnnnnnnnnnnnnnnnnnnnnnnnnnnnnnnnnnnnnnnnnnnnnnnnnnnnnnnnnnnnnnnnnnnnnnnnnnnnnnnnnnnnnnnnnnnnnnnnnnnnnnnnnnnnnnnnnnnnnnnnnnnnnnnnnnnnnnnnnnnnnnnnnnnnnnnnnnnnnnnnnnnnnnnnnnnnnnnnnnnnnnnnnnnnnnnnnnnnnnnnnnnnnnnnnnnnnnnnnnnnnnnnnnnnnnnnnnnnnnnnnnnnnnnnnnnnnnnnnnnnnnnnnnnnnnnnnnnnnnnnnnnnnnnnnnnnnnnnnnnnnnnnnnnnnnnnnnnnnnnnnnnnnnnnnnnnnnnnnnnnnnnnnnnnnnnnnnnnnnnnnnnnnnnnnnnnnnnnnnnnnnnnnnnnnnnnnnnnnnnnnnnnnnnnnnnnnnnnnnnnnnnnnnnnnnnnnnnnnnnnnnnnnnnnnnnnnnnnnnnnnnnnnnnnnnnnnnnnnnnnnnnnnnnnnnnnnnnnnnnnnnnnnnnnnnnnnnnnnnnnnnnnnnnnnnnnnnnnnnnnnnnnnnnnnnnnnnnnnnnnnnnnnnnnnnnnnnnnnnnnnnnnnnnnnnnnnnnnnnnnnnnnnnnnnnnnnnnnnnnnnnnnnnnnnnnnnnnnnnnnnnnnnnnnnnnnnnnnnnnnnnnnnnnnnnnnnnnnnnnnnnnnnnnnnnnnnnnnnnnnnnnnnnnnnnnnnnnnnnnnnnnnnnnnnnnnnnnnnnnnnnnnnnnnnnnnnnnnnnnnnnnnnnnnnnnnnnnnnnnnnnnnnnnnnnnnnnnnnnnnnnnnnnnnnnnnnnnnnnnnnnnnnnnnnnnnnnnnnnnnnnnnnnnnnnnnnnnnnnnnnnnnnnnnnnnnnnnnnnnnnnnnnnnnnnnnnnnnnnnnnnnnnnnnnnnnnnnnnnnnnnnnnnnnnnnnnnnnnnnnnnnnnnnnnnnnnnnnnnnnnnnnnnnnnnnnnnnnnnnnnnnnnnnnnnnnnnnnnnnnnnnnnnnnnnnnnnnnnnnnnnnnnnnnnnnnnnnnnnnnnnnnnnnnnnnnnnnnnnnnnnnnnnnnnnnnnnnnnnnnnnnnnnnnnnnnnnnnnnnnnnnnnnnnnnnnnnnnnnnnnnnnnnnnnnnnnnnnnnnnnnnnnnnnnnnnnnnnnnnnnnnnnnnnnnnnnnnnnnnnnnnnnnnnnnnnnnnnnnnnnnnnnnnnnnnnnnnnnnnnnnnnnnnnnnnnnnnnnnnnnnnnnnnnnnnnnnnnnnnnnnnnnnnnnnnnnnnnnnnnnnnnnnnnnnnnnnnnnnnnnnnnnnnnnnnnnnnnnnnnnnnnnnnnnnnnnnnnnnnnnnnnnnnnnnnnnnnnnnnnnnnnnnnnnnnnnnnnnnnnnnnnnnnnnnnnnnnnnnnnnnnnnnnnnnnnnnnnnnnnnnnnnnnnnnnnnnnnnnnnnnnnnnnnnnnnnnnnnnnnnnnnnnnnnnnnnnnnnnnnnnnnnnnnnnnnnnnnnnnnnnnnnnnnnnnnnnnnnnnnnnnnnnnnnnnnnnnnnnnnnnnnnnnnnnnnnnnnnnnnnnnnnnnnnnnnnnnnnnnnnnnnnnnnnnnnnnnnnnnnnnnnnnnnnnnnnnnnnnnnnnnnnnnnnnnnnnnnnnnnnnnnnnnnnnnnnnnnnnnnnnnnnnnnnnnnnnnnnnnnnnnnnnnnnnnnnnnnnnnnnnnnnnnnnnnnnnnnnnnnnnnnnnnnnnnnnnnnnnnnnnnnnnnnnnnnnnnnnnnnnnnnnnnnnnnnnnnnnnnnnnnnnnnnnnnnnnnnnnnnnnnnnnnnnnnnnnnnnnnnnnnnnnnnnnnnnnnnnnnnnnnnnnnnnnnnnnnnnnnnnnnnnnnnnnnnnnnnnnnnnnnnnnnnnnnnnnnnnnnnnnnnnnnnnnnnnnnnnnnnnnnnnnnnnnnnnnnnnnnnnnnnnnnnnnnnnnnnnnnnnnnnnnnnnnnnnnnnnnnnnnnnnnnnnnnnnnnnnnnnnnnnnnnnnnnnnnnnnnnnnnnnnnnnnnnnnnnnnnnnnnnnnnnnnnnnnnnnnnnnnnnnnnnnnnnnnnnnnnnnnnnnnnnnnnnnnnnnnnnnnnnnnnnnnnnnnnnnnnnnnnnnnnnnnnnnnnnnnnnnnnnnnnnnnnnnnnnnnnnnnnnnnnnnnnnnnnnnnnnnnnnnnnnnnnnnnnnnnnnnnnnnnnnnnnnnnnnnnnnnnnnnnnnnnnnnnnnnnnnnnnnnnnnnnnnnnnnnnnnnnnnnnnnnnnnnnnnnnnnnnnnnnnnnnnnnnnnnnnnnnnnnnnnnnnnnnnnnnnnnnnnnnnnnnnnnnnnnnnnnnnnnnnnnnnnnnnnnnnnnnnnnnnnnnnnnnnnnnnnnnnnnnnnnnnnnnnnnnnnnnnnnnnnnnnnnnnnnnnnnnnnnnnnnnnnnnnnnnnnnnnnnnnnnnnnnnnnnnnnnnnnnnnnnnnnnnnnnnnnnnnnnnnnnnnnnnnnnnnnnnnnnnnnnnnnnnnnnnnnnnnnnnnnnnnnnnnnnnnnnnnnnnnnnnnnnnnnnnnnnnnnnnnnnnnnnnnnnnnnnnnnnnnnnnnnnnnnnnnnnnnnnnnnnnnnnnnnnnnnnnnnnnnnnnnnnnnnnnnnnnnnnnnnnnnnnnnnnnnnnnnnnnnnnnnnnnnnnnnnnnnnnnnnnnnnnnnnnnnnnnnnnnnnnnnnnnnnnnnnnnnnnnnnnnnnnnnnnnnnnnnnnnnnnnnnnnnnnnnnnnnnnnnnnnnnnnnnnnnnnnnnnnnnnnnnnnnnnnnnnnnnnnnnnnnnnnnnnnnnnnnnnnnnnnnnnnnnnnnnnnnnnnnnnnnnnnnnnnnnnnnnnnnnnnnnnnnnnnnnnnnnnnnnnnnnnnnnnnnnnnnnnnnnnnnnnnnnnnnnnnnnnnnnnnnnnnnnnnnnnnnnnnnnnnnnnnnnnnnnnnnnnnnnnnnnnnnnnnnnnnnnnnnnnnnnnnnnnnnnnnnnnnnnnnnnnnnnnnnnnnnnnnnnnnnnnnnnnnnnnnnnnnnnnnnnnnnnnnnnnnnnnnnnnnnnnnnnnnnnnnnnnnnnnnnnnnnnnnnnnnnnnnnnnnnnnnnnnnnnnnnnnnnnnnnnnnnnnnnnnnnnnnnnnnnnnnnnnnnnnnnnnnnnnnnnnnnnnnnnnnnnnnnnnnnnnnnnnnnnnnnnnnnnnnnnnnnnnnnnnnnnnnnnnnnnnnnnnnnnnnnnnnnnnnnnnnnnnnnnnnnnnnnnnnnnnnnnnnnnnnnnnnnnnnnnnnnnnnnnnnnnnnnnnnnnnnnnnnnnnnnnnnnnnnnnnnnnnnnnnnnnnnnnnnnnnnnnnnnnnnnnnnnnnnnnnnnnnnnnnnnnnnnnnnnnnnnnnnnnnnnnnnnnnnnnnnnnnnnnnnnnnnnnnnnnnnnnnnnnnnnnnnnnnnnnnnnnnnnnnnnnnnnnnnnnnnnnnnnnnnnnnnnnnnnnnnnnnnnnnnnnnnnnnnnnnnnnnnnnnnnnnnnnnnnnnnnnnnnnnnnnnnnnnnnnnnnnnnnnnnnnnnnnnnnnnnnnnnnnnnnnnnnnnnnnnnnnnnnnnnnnnnnnnnnnnnnnnnnnnnnnnnnnnnnnnnnnnnnnnnnnnnnnnnnnnnnnnnnnnnnnnnnnnnnnnnnnnnnnnnnnnnnnnnnnnnnnnnnnnnnnnnnnnnnnnnnnnnnnnnnnnnnnnnnnnnnnnnnnnnnnnnnnnnnnnnnnnnnnnnnnnnnnnnnnnnnnnnnnnnnnnnnnnnnnnnnnnnnnnnnnnnnnnnnnnnnnnnnnnnnnnnnnnnnnnnnnnnnnnnnnnnnnnnnnnnnnnnnnnnnnnnnnnnnnnnnnnnnnnnnnnnnnnnnnnnnnnnnnnnnnnnnnnnnnnnnnnnnnnnnnnnnnnnnnnnnnnnnnnnnnnnnnnnnnnnnnnnnnnnnnnnnnnnnnnnnnnnnnnnnnnnnnnnnnnnnnnnnnnnnnnnnnnnnnnnnnnnnnnnnnnnnnnnnnnnnnnnnnnnnnnnnnnnnnnnnnnnnnnnnnnnnnnnnnnnnnnnnnnnnnnnnnnnnnnnnnnnnnnnnnnnnnnnnnnnnnnnnnnnnnnnnnnnnnnnnnnnnnnnnnnnnnnnnnnnnnnnnnnnnnnnnnnnnnnnnnnnnnnnnnnnnnnnnnnnnnnnnnnnnnnnnnnnnnnnnnnnnnnnnnnnnnnnnnnnnnnnnnnnnnnnnnnnnnnnnnnnnnnnnnnnnnnnnnnnnnnnnnnnnnnnnnnnnnnnnnnnnnnnnnnnnnnnnnnnnnnnnnnnnnnnnnnnnnnnnnnnnnnnnnnnnnnnnnnnnnnnnnnnnnnnnnnnnnnnnnnnnnnnnnnnnnnnnnnnnnnnnnnnnnnnnnnnnnnnnnnnnnnnnnnnnnnnnnnnnnnnnnnnnnnnnnnnnnnnnnnnnnnnnnnnnnnnnnnnnnnnnnnnnnnnnnnnnnnnnnnnnnnnnnnnnnnnnnnnnnnnnnnnnnnnnnnnnnnnnnnnnnnnnnnnnnnnnnnnnnnnnnnnnnnnnnnnnnnnnnnnnnnnnnnnnnnnnnnnnnnnnnnnnnnnnnnnnnnnnnnnnnnnnnnnnnnnnnnnnnnnnnnnnnnnnnnnnnnnnnnnnnnnnnnnnnnnnnnnnnnnnnnnnnnnnnnnnnnnnnnnnnnnnnnnnnnnnnnnnnnnnnnnnnnnnnnnnnnnnnnnnnnnnnnnnnnnnnnnnnnnnnnnnnnnnnnnnnnnnnnnnnnnnnnnnnnnnnnnnnnnnnnnnnnnnnnnnnnnnnnnnnnnnnnnnnnnnnnnnnnnnnnnnnnnnnnnnnnnnnnnnnnnnnnnnnnnnnnnnnnnnnnnnnnnnnnnnnnnnnnnnnnnnnnnnnnnnnnnnnnnnnnnnnnnnnnnnnnnnnnnnnnnnnnnnnnnnnnnnnnnnnnnnnnnnnnnnnnnnnnnnnnnnnnnnnnnnnnnnnnnnnnnnnnnnnnnnnnnnnnnnnnnnnnnnnnnnnnnnnnnnnnnnnnnnnnnnnnnnnnnnnnnnnnnnnnnnnnnnnnnnnnnnnnnnnnnnnnnnnnnnnnnnnnnnnnnnnnnnnnnnnnnnnnnnnnnnnnnnnnnnnnnnnnnnnnnnnnnnnnnnnnnnnnnnnnnnnnnnnnnnnnnnnnnnnnnnnnnnnnnnnnnnnnnnnnnnnnnnnnnnnnnnnnnnnnnnnnnnnnnnnnnnnnnnnnnnnnnnnnnnnnnnnnnnnnnnnnnnnnnnnnnnnnnnnnnnnnnnnnnnnnnnnnnnnnnnnnnnnnnnnnnnnnnnnnnnnnnnnnnnnnnnnnnnnnnnnnnnnnnnnnnnnnnnnnnnnnnnnnnnnnnnnnnnnnnnnnnnnnnnnnnnnnnnnnnnnnnnnnnnnnnnnnnnnnnnnnnnnnnnnnnnnnnnnnnnnnnnnnnnnnnnnnnnnnnnnnnnnnnnnnnnnnnnnnnnnnnnnnnnnnnnnnnnnnnnnnnnnnnnnnnnnnnnnnnnnnnnnnnnnnnnnnnnnnnnnnnnnnnnnnnnnnnnnnnnnnnnnnnnnnnnnnnnnnnnnnnnnnnnnnnnnnnnnnnnnnnnnnnnnnnnnnnnnnnnnnnnnnnnnnnnnnnnnnnnnnnnnnnnnnnnnnnnnnnnnnnnnnnnnnnnnnnnnnnnnnnnnnnnnnnnnnnnnnnnnnnnnnnnnnnnnnnnnnnnnnnnnnnnnnnnnnnnnnnnnnnnnnnnnnnnnnnnnnnnnnnnnnnnnnnnnnnnnnnnnnnnnnnnnnnnnnnnnnnnnnnnnnnnnnnnnnnnnnnnnnnnnnnnnnnnnnnnnnnnnnnnnnnnnnnnnnnnnnnnnnnnnnnnnnnnnnnnnnnnnnnnnnnnnnnnnnnnnnnnnnnnnnnnnnnnnnnnnnnnnnnnnnnnnnnnnnnnnnnnnnnnnnnnnnnnnnnnnnnnnnnnnnnnnnnnnnnnnnnnnnnnnnnnnnnnnnnnnnnnnnnnnnnnnnnnnnnnnnnnnnnnnnnnnnnnnnnnnnnnnnnnnnnnnnnnnnnnnnnnnnnnnnnnnnnnnnnnnnnnnnnnnnnnnnnnnnnnnnnnnnnnnnnnnnnnnnnnnnnnnnnnnnnnnnnnnnnnnnnnnnnnnnnnnnnnnnnnnnnnnnnnnnnnnnnnnnnnnnnnnnnnnnnnnnnnnnnnnnnnnnnnnnnnnnnnnnnnnnnnnnnnnnnnnnnnnnnnnnnnnnnnnnnnnnnnnnnnnnnnnnnnnnnnnnnnnnnnnnnnnnnnnnnnnnnnnnnnnnnnnnnnnnnnnnnnnnnnnnnnnnnnnnnnnnnnnnnnnnnnnnnnnnnnnnnnnnnnnnnnnnnnnnnnnnnnnnnnnnnnnnnnnnnnnnnnnnnnnnnnnnnnnnnnnnnnnnnnnnnnnnnnnnnnnnnnnnnnnnnnnnnnnnnnnnnnnnnnnnnnnnnnnnnnnnnnnnnnnnnnnnnnnnnnnnnnnnnnnnnnnnnnnnnnnnnnnnnnnnnnnnnnnnnnnnnnnnnnnnnnnnnnnnnnnnnnnnnnnnnnnnnnnnnnnnnnnnnnnnnnnnnnnnnnnnnnnnnnnnnnnnnnnnnnnnnnnnnnnnnnnnnnnnnnnnnnnnnnnnnnnnnnnnnnnnnnnnnnnnnnnnnnnnnnnnnnnnnnnnnnnnnnnnnnnnnnnnnnnnnnnnnnnnnnnnnnnnnnnnnnnnnnnnnnnnnnnnnnnnnnnnnnnnnnnnnnnnnnnnnnnnnnnnnnnnnnnnnnnnnnnnnnnnnnnnnnnnnnnnnnnnnnnnnnnnnnnnnnnnnnnnnnnnnnnnnnnnnnnnnnnnnnnnnnnnnnnnnnnnnnnnnnnnnnnnnnnnnnnnnnnnnnnnnnnnnnnnnnnnnnnnnnnnnnnnnnnnnnnnnnnnnnnnnnnnnnnnnnnnnnnnnnnnnnnnnnnnnnnnnnnnnnnnnnnnnnnnnnnnnnnnnnnnnnnnnnnnnnnnnnnnnnnnnnnnnnnnnnnnnnnnnnnnnnnnnnnnnnnnnnnnnnnnnnnnnnnnnnnnnnnnnnnnnnnnnnnnnnnnnnnnnnnnnnnnnnnnnnnnnnnnnnnnnnnnnnnnnnnnnnnnnnnnnnnnnnnnnnnnnnnnnnnnnnnnnnnnnnnnnnnnnnnnnnnnnnnnnnnnnnnnnnnnnnnnnnnnnnnnnnnnnnnnnnnnnnnnnnnnnnnnnnnnnnnnnnnnnnnnnnnnnnnnnnnnnnnnnnnnnnnnnnnnnnnnnnnnnnnnnnnnnnnnnnnnnnnnnnnnnnnnnnnnnnnnnnnnnnnnnnnnnnnnnnnnnnnnnnnnnnnnnnnnnnnnnnnnnnnnnnnnnnnnnnnnnnnnnnnnnnnnnnnnnnnnnnnnnnnnnnnnnnnnnnnnnnnnnnnnnnnnnnnnnnnnnnnnnnnnnnnnnnnnnnnnnnnnnnnnnnnnnnnnnnnnnnnnnnnnnnnnnnnnnnnnnnnnnnnnnnnnnnnnnnnnnnnnnnnnnnnnnnnnnnnnnnnnnnnnnnnnnnnnnnnnnnnnnnnnnnnnnnnnnnnnnnnnnnnnnnnnnnnnnnnnnnnnnnnnnnnnnnnnnnnnnnnnnnnnnnnnnnnnnnnnnnnnnnnnnnnnnnnnnnnnnnnnnnnnnnnnnnnnnnnnnnnnnnnnnnnnnnnnnnnnnnnnnnnnnnnnnnnnnnnnnnnnnnnnnnnnnnnnnnnnnnnnnnnnnnnnnnnnnnnnnnnnnnnnnnnnnnnnnnnnnnnnnnnnnnnnnnnnnnnnnnnnnnnnnnnnnnnnnnnnnnnnnnnnnnnnnnnnnnnnnnnnnnnnnnnnnnnnnnnnnnnnnnnnnnnnnnnnnnnnnnnnnnnnnnnnnnnnnnnnnnnnnnnnnnnnnnnnnnnnnnnnnnnnnnnnnnnnnnnnnnnnnnnnnnnnnnnnnnnnnnnnnnnnnnnnnnnnnnnnnnnnnnnnnnnnnnnnnnnnnnnnnnnnnnnnnnnnnnnnnnnnnnnnnnnnnnnnnnnnnnnnnnnnnnnnnnnnnnnnnnnnnnnnnnnnnnnnnnnnnnnnnnnnnnnnnnnnnnnnnnnnnnnnnnnnnnnnnnnnnnnnnnnnnnnnnnnnnnnnnnnnnnnnnnnnnnnnnnnnnnnnnnnnnnnnnnnnnnnnnnnnnnnnnnnnnnnnnnnnnnnnnnnnnnnnnnnnnnnnnnnnnnnnnnnnnnnnnnnnnnnnnnnnnnnnnnnnnnnnnnnnnnnnnnnnnnnnnnnnnnnnnnnnnnnnnnnnnnnnnnnnnnnnnnnnnnnnnnnnnnnnnnnnnnnnnnnnnnnnnnnnnnnnnnnnnnnnnnnnnnnnnnnnnnnnnnnnnnnnnnnnnnnnnnnnnnnnnnnnnnnnnnnnnnnnnnnnnnnnnnnnnnnnnnnnnnnnnnnnnnnnnnnnnnnnnnnnnnnnnnnnnnnnnnnnnnnnnnnnnnnnnnnnnnnnnnnnnnnnnnnnnnnnnnnnnnnnnnnnnnnnnnnnnnnnnnnnnnnnnnnnnnnnnnnnnnnnnnnnnnnnnnnnnnnnnnnnnnnnnnnnnnnnnnnnnnnnnnnnnnnnnnnnnnnnnnnnnnnnnnnnnnnnnnnnnnnnnnnnnnnnnnnnnnnnnnnnnnnnnnnnnnnnnnnnnnnnnnnnnnnnnnnnnnnnnnnnnnnnnnnnnnnnnnnnnnnnnnnnnnnnnnnnnnnnnnnnnnnnnnnnnnnnnnnnnnnnnnnnnnnnnnnnnnnnnnnnnnnnnnnnnnnnnnnnnnnnnnnnnnnnnnnnnnnnnnnnnnnnnnnnnnnnnnnnnnnnnnnnnnnnnnnnnnnnnnnnnnnnnnnnnnnnnnnnnnnnnnnnnnnnnnnnnnnnnnnnnnnnnnnnnnnnnnnnnnnnnnnnnnnnnnnnnnnnnnnnnnnnnnnnnnnnnnnnnnnnnnnnnnnnnnnnnnnnnnnnnnnnnnnnnnnnnnnnnnnnnnnnnnnnnnnnnnnnnnnnnnnnnnnnnnnnnnnnnnnnnnnnnnnnnnnnnnnnnnnnnnnnnnnnnnnnnnnnnnnnnnnnnnnnnnnnnnnnnnnnnnnnnnnnnnnnnnnnnnnnnnnnnnnnnnnnnnnnnnnnnnnnnnnnnnnnnnnnnnnnnnnnnnnnnnnnnnnnnnnnnnnnnnnnnnnnnnnnnnnnnnnnnnnnnnnnnnnnnnnnnnnnnnnnnnnnnnnnnnnnnnnnnnnnnnnnnnnnnnnnnnnnnnnnnnnnnnnnnnnnnnnnnnnnnnnnnnnnnnnnnnnnnnnnnnnnnnnnnnnnnnnnnnnnnnnnnnnnnnnnnnnnnnnnnnnnnnnnnnnnnnnnnnnnnnnnnnnnnnnnnnnnnnnnnnnnnnnnnnnnnnnnnnnnnnnnnnnnnnnnnnnnnnnnnnnnnnnnnnnnnnnnnnnnnnnnnnnnnnnnnnnnnnnnnnnnnnnnnnnnnnnnnnnnnnnnnnnnnnnnnnnnnnnnnnnnnnnnnnnnnnnnnnnnnnnnnnnnnnnnnnnnnnnnnnnnnnnnnnnnnnnnnnnnnnnnnnnnnnnnnnnnnnnnnnnnnnnnnnnnnnnnnnnnnnnnnnnnnnnnnnnnnnnnnnnnnnnnnnnnnnnnnnnnnnnnnnnnnnnnnnnnnnnnnnnnnnnnnnnnnnnnnnnnnnnnnnnnnnnnnnnnnnnnnnnnnnnnnnnnnnnnnnnnnnnnnnnnnnnnnnnnnnnnnnnnnnnnnnnnnnnnnnnnnnnnnnnnnnnnnnnnnnnnnnnnnnnnnnnnnnnnnnnnnnnnnnnnnnnnnnnnnnnnnnnnnnnnnnnnnnnnnnnnnnnnnnnnnnnnnnnnnnnnnnnnnnnnnnnnnnnnnnnnnnnnnnnnnnnnnnnnnnnnnnnnnnnnnnnnnnnnnnnnnnnnnnnnnnnnnnnnnnnnnnnnnnnnnnnnnnnnnnnnnnnnnnnnnnnnnnnnnnnnnnnnnnnnnnnnnnnnnnnnnnnnnnnnnnnnnnnnnnnnnnnnnnnnnnnnnnnnnnnnnnnnnnnnnnnnnnnnnnnnnnnnnnnnnnnnnnnnnnnnnnnnnnnnnnnnnnnnnnnnnnnnnnnnnnnnnnnnnnnnnnnnnnnnnnnnnnnnnnnnnnnnnnnnnnnnnnnnnnnnnnnnnnnnnnnnnnnnnnnnnnnnnnnnnnnnnnnnnnnnnnnnnnnnnnnnnnnnnnnnnnnnnnnnnnnnnnnnnnnnnnnnnnnnnnnnnnnnnnnnnnnnnnnnnnnnnnnnnnnnnnnnnnnnnnnnnnnnnnnnnnnnnnnnnnnnnnnnnnnnnnnnnnnnnnnnnnnnnnnnnnnnnnnnnnnnnnnnnnnnnnnnnnnnnnnnnnnnnnnnnnnnnnnnnnnnnnnnnnnnnnnnnnnnnnnnnnnnnnnnnnnnnnnnnnnnnnnnnnnnnnnnnnnnnnnnnnnnnnnnnnnnnnnnnnnnnnnnnnnnnnnnnnnnnnnnnnnnnnnnnnnnnnnnnnnnnnnnnnnnnnnnnnnnnnnnnnnnnnnnnnnnnnnnnnnnnnnnnnnnnnnnnnnnnnnnnnnnnnnnnnnnnnnnnnnnnnnnnnnnnnnnnnnnnnnnnnnnnnnnnnnnnnnnnnnnnnnnnnnnnnnnnnnnnnnnnnnnnnnnnnnnnnnnnnnnnnnnnnnnnnnnnnnnnnnnnnnnnnnnnnnnnnnnnnnnnnnnnnnnnnnnnnnnnnnnnnnnnnnnnnnnnnnnnnnnnnnnnnnnnnnnnnnnnnnnnnnnnnnnnnnnnnnnnnnnnnnnnnnnnnnnnnnnnnnnnnnnnnnnnnnnnnnnnnnnnnnnnnnnnnnnnnnnnnnnnnnnnnnnnnnnnnnnnnnnnnnnnnnnnnnnnnnnnnnnnnnnnnnnnnnnnnnnnnnnnnnnnnnnnnnnnnnnnnnnnnnnnnnnnnnnnnnnnnnnnnnnnnnnnnnnnnnnnnnnnnnnnnnnnnnnnnnnnnnnnnnnnnnnnnnnnnnnnnnnnnnnnnnnnnnnnnnnnnnnnnnnnnnnnnnnnnnnnnnnnnnnnnnnnnnnnnnnnnnnnnnnnnnnnnnnnnnnnnnnnnnnnnnnnnnnnnnnnnnnnnnnnnnnnnnnnnnnnnnnnnnnnnnnnnnnnnnnnnnnnnnnnnnnnnnnnnnnnnnnnnnnnnnnnnnnnnnnnnnnnnnnnnnnnnnnnnnnnnnnnnnnnnnnnnnnnnnnnnnnnnnnnnnnnnnnnnnnnnnnnnnnnnnnnnnnnnnnnnnnnnnnnnnnnnnnnnnnnnnnnnnnnnnnnnnnnnnnnnnnnnnnnnnnnnnnnnnnnnnnnnnnnnnnnnnnnnnnnnnnnnnnnnnnnnnnnnnnnnnnnnnnnnnnnnnnnnnnnnnnnnnnnnnnnnnnnnnnnnnnnnnnnnnnnnnnnnnnnnnnnnnnnnnnnnnnnnnnnnnnnnnnnnnnnnnnnnnnnnnnnnnnnnnnnnnnnnnnnnnnnnnnnnnnnnnnnnnnnnnnnnnnnnnnnnnnnnnnnnnnnnnnnnnnnnnnnnnnnnnnnnnnnnnnnnnnnnnnnnnnnnnnnnnnnnnnnnnnnnnnnnnnnnnnnnnnnnnnnnnnnnnnnnnnnnnnnnnnnnnnnnnnnnnnnnnnnnnnnnnnnnnnnnnnnnnnnnnnnnnnnnnnnnnnnnnnnnnnnnnnnnnnnnnnnnnnnnnnnnnnnnnnnnnnnnnnnnnnnnnnnnnnnnnnnnnnnnnnnnnnnnnnnnnnnnnnnnnnnnnnnnnnnnnnnnnnnnnnnnnnnnnnnnnnnnnnnnnnnnnnnnnnnnnnnnnnnnnnnnnnnnnnnnnnnnnnnnnnnnnnnnnnnnnnnnnnnnnnnnnnnnnnnnnnnnnnnnnnnnnnnnnnnnnnnnnnnnnnnnnnnnnnnnnnnnnnnnnnnnnnnnnnnnnnnnnnnnnnnnnnnnnnnnnnnnnnnnnnnnnnnnnnnnnnnnnnnnnnnnnnnnnnnnnnnnnnnnnnnnnnnnnnnnnnnnnnnnnnnnnnnnnnnnnnnnnnnnnnnnnnnnnnnnnnnnnnnnnnnnnnnnnnnnnnnnnnnnnnnnnnnnnnnnnnnnnnnnnnnnnnnnnnnnnnnnnnnnnnnnnnnnnnnnnnnnnnnnnnnnnnnnnnnnnnnnnnnnnnnnnnnnnnnnnnnnnnnnnnnnnnnnnnnnnnnnnnnnnnnnnnnnnnnnnnnnnnnnnnnnnnnnnnnnnnnnnnnnnnnnnnnnnnnnnnnnnnnnnnnnnnnnnnnnnnnnnnnnnnnnnnnnnnnnnnnnnnnnnnnnnnnnnnnnnnnnnnnnnnnnnnnnnnnnnnnnnnnnnnnnnnnnnnnnnnnnnnnnnnnnnnnnnnnnnnnnnnnnnnnnnnnnnnnnnnnnnnnnnnnnnnnnnnnnnnnnnnnnnnnnnnnnnnnnnnnnnnnnnnnnnnnnnnnnnnnnnnnnnnnnnnnnnnnnnnnnnnnnnnnnnnnnnnnnnnnnnnnnnnnnnnnnnnnnnnnnnnnnnnnnnnnnnnnnnnnnnnnnnnnnnnnnnnnnnnnnnnnnnnnnnnnnnnnnnnnnnnnnnnnnnnnnnnnnnnnnnnnnnnnnnnnnnnnnnnnnnnnnnnnnnnnnnnnnnnnnnnnnnnnnnnnnnnnnnnnnnnnnnnnnnnnnnnnnnnnnnnnnnnnnnnnnnnnnnnnnnnnnnnnnnnnnnnnnnnnnnnnnnnnnnnnnnnnnnnnnnnnnnnnnnnnnnnnnnnnnnnnnnnnnnnnnnnnnnnnnnnnnnnnnnnnnnnnnnnnnnnnnnnnnnnnnnnnnnnnnnnnnnnnnnnnnnnnnnnnnnnnnnnnnnnnnnnnnnnnnnnnnnnnnnnnnnnnnnnnnnnnnnnnnnnnnnnnnnnnnnnnnnnnnnnnnnnnnnnnnnnnnnnnnnnnnnnnnnnnnnnnnnnnnnnnnnnnnnnnnnnnnnnnnnnnnnnnnnnnnnnnnnnnnnnnnnnnnnnnnnnnnnnnnnnnnnnnnnnnnnnnnnnnnnnnnnnnnnnnnnnnnnnnnnnnnnnnnnnnnnnnnnnnnnnnnnnnnnnnnnnnnnnnnnnnnnnnnnnnnnnnnnnnnnnnnnnnnnnnnnnnnnnnnnnnnnnnnnnnnnnnnnnnnnnnnnnnnnnnnnnnnnnnnnnnnnnnnnnnnnnnnnnnnnnnnnnnnnnnnnnnnnnnnnnnnnnnnnnnnnnnnnnnnnnnnnnnnnnnnnnnnnnnnnnnnnnnnnnnnnnnnnnnnnnnnnnnnnnnnnnnnnnnnnnnnnnnnnnnnnnnnnnnnnnnnnnnnnnnnnnnnnnnnnnnnnnnnnnnnnnnnnnnnnnnnnnnnnnnnnnnnnnnnnnnnnnnnnnnnnnnnnnnnnnnnnnnnnnnnnnnnnnnnnnnnnnnnnnnnnnnnnnnnnnnnnnnnnnnnnnnnnnnnnnnnnnnnnnnnnnnnnnnnnnnnnnnnnnnnnnnnnnnnnnnnnnnnnnnnnnnnnnnnnnnnnnnnnnnnnnnnnnnnnnnnnnnnnnnnnnnnnnnnnnnnnnnnnnnnnnnnnnnnnnnnnnnnnnnnnnnnnnnnnnnnnnnnnnnnnnnnnnnnnnnnnnnnnnnnnnnnnnnnnnnnnnnnnnnnnnnnnnnnnnnnnnnnnnnnnnnnnnnnnnnnnnnnnnnnnnnnnnnnnnnnnnnnnnnnnnnnnnnnnnnnnnnnnnnnnnnnnnnnnnnnnnnnnnnnnnnnnnnnnnnnnnnnnnnnnnnnnnnnnnnnnnnnnnnnnnnnnnnnnnnnnnnnnnnnnnnnnnnnnnnnnnnnnnnnnnnnnnnnnnnnnnnnnnnnnnnnnnnnnnnnnnnnnnnnnnnnnnnnnnnnnnnnnnnnnnnnnnnnnnnnnnnnnnnnnnnnnnnnnnnnnnnnnnnnnnnnnnnnnnnnnnnnnnnnnnnnnnnnnnnnnnnnnnnnnnnnnnnnnnnnnnnnnnnnnnnnnnnnnnnnnnnnnnnnnnnnnnnnnnnnnnnnnnnnnnnnnnnnnnnnnnnnnnnnnnnnnnnnnnnnnnnnnnnnnnnnnnnnnnnnnnnnnnnnnnnnnnnnnnnnnnnnnnnnnnnnnnnnnnnnnnnnnnnnnnnnnnnnnnnnnnnnnnnnnnnnnnnnnnnnnnnnnnnnnnnnnnnnnnnnnnnnnnnnnnnnnnnnnnnnnnnnnnnnnnnnnnnnnnnnnnnnnnnnnnnnnnnnnnnnnnnnnnnnnnnnnnnnnnnnnnnnnnnnnnnnnnnnnnnnnnnnnnnnnnnnnnnnnnnnnnnnnnnnnnnnnnnnnnnnnnnnnnnnnnnnnnnnnnnnnnnnnnnnnnnnnnnnnnnnnnnnnnnnnnnnnnnnnnnnnnnnnnnnnnnnnnnnnnnnnnnnnnnnnnnnnnnnnnnnnnnnnnnnnnnnnnnnnnnnnnnnnnnnnnnnnnnnnnnnnnnnnnnnnnnnnnnnnnnnnnnnnnnnnnnnnnnnnnnnnnnnnnnnnnnnnnnnnnnnnnnnnnnnnnnnnnnnnnnnnnnnnnnnnnnnnnnnnnnnnnnnnnnnnnnnnnnnnnnnnnnnnnnnnnnnnnnnnnnnnnnnnnnnnnnnnnnnnnnnnnnnnnnnnnnnnnnnnnnnnnnnnnnnnnnnnnnnnnnnnnnnnnnnnnnnnnnnnnnnnnnnnnnnnnnnnnnnnnnnnnnnnnnnnnnnnnnnnnnnnnnnnnnnnnnnnnnnnnnnnnnnnnnnnnnnnnnnnnnnnnnnnnnnnnnnnnnnnnnnnnnnnnnnnnnnnnnnnnnnnnnnnnnnnnnnnnnnnnnnnnnnnnnnnnnnnnnnnnnnnnnnnnnnnnnnnnnnnnnnnnnnnnnnnnnnnnnnnnnnnnnnnnnnnnnnnnnnnnnnnnnnnnnnnnnnnnnnnnnnnnnnnnnnnnnnnnnnnnnnnnnnnnnnnnnnnnnnnnnnnnnnnnnnnnnnnnnnnnnnnnnnnnnnnnnnnnnnnnnnnnnnnnnnnnnnnnnnnnnnnnnnnnnnnnnnnnnnnnnnnnnnnnnnnnnnnnnnnnnnnnnnnnnnnnnnnnnnnnnnnnnnnnnnnnnnnnnnnnnnnnnnnnnnnnnnnnnnnnnnnnnnnnnnnnnnnnnnnnnnnnnnnnnnnnnnnnnnnnnnnnnnnnnnnnnnnnnnnnnnnnnnnnnnnnnnnnnnnnnnnnnnnnnnnnnnnnnnnnnnnnnnnnnnnnnnnnnnnnnnnnnnnnnnnnnnnnnnnnnnnnnnnnnnnnnnnnnnnnnnnnnnnnnnnnnnnnnnnnnnnnnnnnnnnnnnnnnnnnnnnnnnnnnnnnnnnnnnnnnnnnnnnnnnnnnnnnnnnnnnnnnnnnnnnnnnnnnnnnnnnnnnnnnnnnnnnnnnnnnnnnnnnnnnnnnnnnnnnnnnnnnnnnnnnnnnnnnnnnnnnnnnnnnnnnnnnnnnnnnnnnnnnnnnnnnnnnnnnnnnnnnnnnnnnnnnnnnnnnnnnnnnnnnnnnnnnnnnnnnnnnnnnnnnnnnnnnnnnnnnnnnnnnnnnnnnnnnnnnnnnnnnnnnnnnnnnnnnnnnnnnnnnnnnnnnnnnnnnnnnnnnnnnnnnnnnnnnnnnnnnnnnnnnnnnnnnnnnnnnnnnnnnnnnnnnnnnnnnnnnnnnnnnnnnnnnnnnnnnnnnnnnnnnnnnnnnnnnnnnnnnnnnnnnnnnnnnnnnnnnnnnnnnnnnnnnnnnnnnnnnnnnnnnnnnnnnnnnnnnnnnnnnnnnnnnnnnnnnnnnnnnnnnnnnnnnnnnnnnnnnnnnnnnnnnnnnnnnnnnnnnnnnnnnnnnnnnnnnnnnnnnnnnnnnnnnnnnnnnnnnnnnnnnnnnnnnnnnnnnnnnnnnnnnnnnnnnnnnnnnnnnnnnnnnnnnnnnnnnnnnnnnnnnnnnnnnnnnnnnnnnnnnnnnnnnnnnnnnnnnnnnnnnnnnnnnnnnnnnnnnnnnnnnnnnnnnnnnnnnnnnnnnnnnnnnnnnnnnnnnnnnnnnnnnnnnnnnnnnnnnnnnnnnnnnnnnnnnnnnnnnnnnnnnnnnnnnnnnnnnnnnnnnnnnnnnnnnnnnnnnnnnnnnnnnnnnnnnnnnnnnnnnnnnnnnnnnnnnnnnnnnnnnnnnnnnnnnnnnnnnnnnnnnnnnnnnnnnnnnnnnnnnnnnnnnnnnnnnnnnnnnnnnnnnnnnnnnnnnnnnnnnnnnnnnnnnnnnnnnnnnnnnnnnnnnnnnnnnnnnnnnnnnnnnnnnnnnnnnnnnnnnnnnnnnnnnnnnnnnnnnnnnnnnnnnnnnnnnnnnnnnnnnnnnnnnnnnnnnnnnnnnnnnnnnnnnnnnnnnnnnnnnnnnnnnnnnnnnnnnnnnnnnnnnnnnnnnnnnnnnnnnnnnnnnnnnnnnnnnnnnnnnnnnnnnnnnnnnnnnnnnnnnnnnnnnnnnnnnnnnnnnnnnnnnnnnnnnnnnnnnnnnnnnnnnnnnnnnnnnnnnnnnnnnnnnnnnnnnnnnnnnnnnnnnnnnnnnnnnnnnnnnnnnnnnnnnnnnnnnnnnnnnnnnnnnnnnnnnnnnnnnnnnnnnnnnnnnnnnnnnnnnnnnnnnnnnnnnnnnnnnnnnnnnnnnnnnnnnnnnnnnnnnnnnnnnnnnnnnnnnnnnnnnnnnnnnnnnnnnnnnnnnnnnnnnnnnnnnnnnnnnnnnnnnnnnnnnnnnnnnnnnnnnnnnnnnnnnnnnnnnnnnnnnnnnnnnnnnnnnnnnnnnnnnnnnnnnnnnnnnnnnnnnnnnnnnnnnnnnnnnnnnnnnnnnnnnnnnnnnnnnnnnnnnnnnnnnnnnnnnnnnnnnnnnnnnnnnnnnnnnnnnnnnnnnnnnnnnnnnnnnnnnnnnnnnnnnnnnnnnnnnnnnnnnnnnnnnnnnnnnnnnnnnnnnnnnnnnnnnnnnnnnnnnnnnnnnnnnnnnnnnnnnnnnnnnnnnnnnnnnnnnnnnnnnnnnnnnnnnnnnnnnnnnnnnnnnnnnnnnnnnnnnnnnnnnnnnnnnnnnnnnnnnnnnnnnnnnnnnnnnnnnnnnnnnnnnnnnnnnnnnnnnnnnnnnnnnnnnnnnnnnnnnnnnnnnnnnnnnnnnnnnnnnnnnnnnnnnnnnnnnnnnnnnnnnnnnnnnnnnnnnnnnnnnnnnnnnnnnnnnnnnnnnnnnnnnnnnnnnnnnnnnnnnnnnnnnnnnnnnnnnnnnnnnnnnnnnnnnnnnnnnnnnnnnnnnnnnnnnnnnnnnnnnnnnnnnnnnnnnnnnnnnnnnnnnnnnnnnnnnnnnnnnnnnnnnnnnnnnnnnnnnnnnnnnnnnnnnnnnnnnnnnnnnnnnnnnnnnnnnnnnnnnnnnnnnnnnnnnnnnnnnnnnnnnnnnnnnnnnnnnnnnnnnnnnnnnnnnnnnnnnnnnnnnnnnnnnnnnnnnnnnnnnnnnnnnnnnnnnnnnnnnnnnnnnnnnnnnnnnnnnnnnnnnnnnnnnnnnnnnnnnnnnnnnnnnnnnnnnnnnnnnnnnnnnnnnnnnnnnnnnnnnnnnnnnnnnnnnnnnnnnnnnnnnnnnnnnnnnnnnnnnnnnnnnnnnnnnnnnnnnnnnnnnnnnnnnnnnnnnnnnnnnnnnnnnnnnnnnnnnnnnnnnnnnnnnnnnnnnnnnnnnnnnnnnnnnnnnnnnnnnnnnnnnnnnnnnnnnnnnnnnnnnnnnnnnnnnnnnnnnnnnnnnnnnnnnnnnnnnnnnnnnnnnnnnnnnnnnnnnnnnnnnnnnnnnnnnnnnnnnnnnnnnnnnnnnnnnnnnnnnnnnnnnnnnnnnnnnnnnnnnnnnnnnnnnnnnnnnnnnnnnnnnnnnnnnnnnnnnnnnnnnnnnnnnnnnnnnnnnnnnnnnnnnnnnnnnnnnnnnnnnnnnnnnnnnnnnnnnnnnnnnnnnnnnnnnnnnnnnnnnnnnnnnnnnnnnnnnnnnnnnnnnnnnnnnnnnnnnnnnnnnnnnnnnnnnnnnnnnnnnnnnnnnnnnnnnnnnnnnnnnnnnnnnnnnnnnnnnnnnnnnnnnnnnnnnnnnnnnnnnnnnnnnnnnnnnnnnnnnnnnnnnnnnnnnnnnnnnnnnnnnnnnnnnnnnnnnnnnnnnnnnnnnnnnnnnnnnnnnnnnnnnnnnnnnnnnnnnnnnnnnnnnnnnnnnnnnnnnnnnnnnnnnnnnnnnnnnnnnnnnnnnnnnnnnnnnnnnnnnnnnnnnnnnnnnnnnnnnnnnnnnnnnnnnnnnnnnnnnnnnnnnnnnnnnnnnnnnnnnnnnnnnnnnnnnnnnnnnnnnnnnnnnnnnnnnnnnnnnnnnnnnnnnnnnnnnnnnnnnnnnnnnnnnnnnnnnnnnnnnnnnnnnnnnnnnnnnnnnnnnnnnnnnnnnnnnnnnnnnnnnnnnnnnnnnnnnnnnnnnnnnnnnnnnnnnnnnnnnnnnnnnnnnnnnnnnnnnnnnnnnnnnnnnnnnnnnnnnnnnnnnnnnnnnnnnnnnnnnnnnnnnnnnnnnnnnnnnnnnnnnnnnnnnnnnnnnnnnnnnnnnnnnnnnnnnnnnnnnnnnnnnnnnnnnnnnnnnnnnnnnnnnnnnnnnnnnnnnnnnnnnnnnnnnnnnnnnnnnnnnnnnnnnnnnnnnnnnnnnnnnnnnnnnnnnnnnnnnnnnnnnnnnnnnnnnnnnnnnnnnnnnnnnnnnnnnnnnnnnnnnnnnnnnnnnnnnnnnnnnnnnnnnnnnnnnnnnnnnnnnnnnnnnnnnnnnnnnnnnnnnnnnnnnnnnnnnnnnnnnnnnnnnnnnnnnnnnnnnnnnnnnnnnnnnnnnnnnnnnnnnnnnnnnnnnnnnnnnnnnnnnnnnnnnnnnnnnnnnnnnnnnnnnnnnnnnnnnnnnnnnnnnnnnnnnnnnnnnnnnnnnnnnnnnnnnnnnnnnnnnnnnnnnnnnnnnnnnnnnnnnnnnnnnnnnnnnnnnnnnnnnnnnnnnnnnnnnnnnnnnnnnnnnnnnnnnnnnnnnnnnnnnnnnnnnnnnnnnnnnnnnnnnnnnnnnnnnnnnnnnnnnnnnnnnnnnnnnnnnnnnnnnnnnnnnnnnnnnnnnnnnnnnnnnnnnnnnnnnnnnnnnnnnnnnnnnnnnnnnnnnnnnnnnnnnnnnnnnnnnnnnnnnnnnnnnnnnnnnnnnnnnnnnnnnnnnnnnnnnnnnnnnnnnnnnnnnnnnnnnnnnnnnnnnnnnnnnnnnnnnnnnnnnnnnnnnnnnnnnnnnnnnnnnnnnnnnnnnnnnnnnnnnnnnnnnnnnnnnnnnnnnnnnnnnnnnnnnnnnnnnnnnnnnnnnnnnnnnnnnnnnnnnnnnnnnnnnnnnnnnnnnnnnnnnnnnnnnnnnnnnnnnnnnnnnnnnnnnnnnnnnnnnnnnnnnnnnnnnnnnnnnnnnnnnnnnnnnnnnnnnnnnnnnnnnnnnnnnnnnnnnnnnnnnnnnnnnnnnnnnnnnnnnnnnnnnnnnnnnnnnnnnnnnnnnnnnnnnnnnnnnnnnnnnnnnnnnnnnnnnnnnnnnnnnnnnnnnnnnnnnnnnnnnnnnnnnnnnnnnnnnnnnnnnnnnnnnnnnnnnnnnnnnnnnnnnnnnnnnnnnnnnnnnnnnnnnnnnnnnnnnnnnnnnnnnnnnnnnnnnnnnnnnnnnnnnnnnnnnnnnnnnnnnnnnnnnnnnnnnnnnnnnnnnnnnnnnnnnnnnnnnnnnnnnnnnnnnnnnnnnnnnnnnnnnnnnnnnnnnnnnnnnnnnnnnnnnnnnnnnnnnnnnnnnnnnnnnnnnnnnnnnnnnnnnnnnnnnnnnnnnnnnnnnnnnnnnnnnnnnnnnnnnnnnnnnnnnnnnnnnnnnnnnnnnnnnnnnnnnnnnnnnnnnnnnnnnnnnnnnnnnnnnnnnnnnnnnnnnnnnnnnnnnnnnnnnnnnnnnnnnnnnnnnnnnnnnnnnnnnnnnnnnnnnnnnnnnnnnnnnnnnnnnnnnnnnnnnnnnnnnnnnnnnnnnnnnnnnnnnnnnnnnnnnnnnnnnnnnnnnnnnnnnnnnnnnnnnnnnnnnnnnnnnnnnnnnnnnnnnnnnnnnnnnnnnnnnnnnnnnnnnnnnnnnnnnnnnnnnnnnnnnnnnnnnnnnnnnnnnnnnnnnnnnnnnnnnnnnnnnnnnnnnnnnnnnnnnnnnnnnnnnnnnnnnnnnnnnnnnnnnnnnnnnnnnnnnnnnnnnnnnnnnnnnnnnnnnnnnnnnnnnnnnnnnnnnnnnnnnnnnnnnnnnnnnnnnnnnnnnnnnnnnnnnnnnnnnnnnnnnnnnnnnnnnnnnnnnnnnnnnnnnnnnnnnnnnnnnnnnnnnnnnnnnnnnnnnnnnnnnnnnnnnnnnnnnnnnnnnnnnnnnnnnnnnnnnnnnnnnnnnnnnnnnnnnnnnnnnnnnnnnnnnnnnnnnnnnnnnnnnnnnnnnnnnnnnnnnnnnnnnnnnnnnnnnnnnnnnnnnnnnnnnnnnnnnnnnnnnnnnnnnnnnnnnnnnnnnnnnnnnnnnnnnnnnnnnnnnnnnnnnnnnnnnnnnnnnnnnnnnnnnnnnnnnnnnnnnnnnnnnnnnnnnnnnnnnnnnnnnnnnnnnnnnnnnnnnnnnnnnnnnnnnnnnnnnnnnnnnnnnnnnnnnnnnnnnnnnnnnnnnnnnnnnnnnnnnnnnnnnnnnnnnnnnnnnnnnnnnnnnnnnnnnnnnnnnnnnnnnnnnnnnnnnnnnnnnnnnnnnnnnnnnnnnnnnnnnnnnnnnnnnnnnnnnnnnnnnnnnnnnnnnnnnnnnnnnnnnnnnnnnnnnnnnnnnnnnnnnnnnnnnnnnnnnnnnnnnnnnnnnnnnnnnnnnnnnnnnnnnnnnnnnnnnnnnnnnnnnnnnnnnnnnnnnnnnnnnnnnnnnnnnnnnnnnnnnnnnnnnnnnnnnnnnnnnnnnnnnnnnnnnnnnnnnnnnnnnnnnnnnnnnnnnnnnnnnnnnnnnnnnnnnnnnnnnnnnnnnnnnnnnnnnnnnnnnnnnnnnnnnnnnnnnnnnnnnnnnnnnnnnnnnnnnnnnnnnnnnnnnnnnnnnnnnnnnnnnnnnnnnnnnnnnnnnnnnnnnnnnnnnnnnnnnnnnnnnnnnnnnnnnnnnnnnnnnnnnnnnnnnnnnnnnnnnnnnnnnnnnnnnnnnnnnnnnnnnnnnnnnnnnnnnnnnnnnnnnnnnnnnnnnnnnnnnnnnnnnnnnnnnnnnnnnnnnnnnnnnnnnnnnnnnnnnnnnnnnnnnnnnnnnnnnnnnnnnnnnnnnnnnnnnnnnnnnnnnnnnnnnnnnnnnnnnnnnnnnnnnnnnnnnnnnnnnnnnnnnnnnnnnnnnnnnnnnnnnnnnnnnnnnnnnnnnnnnnnnnnnnnnnnnnnnnnnnnnnnnnnnnnnnnnnnnnnnnnnnnnnnnnnnnnnnnnnnnnnnnnnnnnnnnnnnnnnnnnnnnnnnnnnnnnnnnnnnnnnnnnnnnnnnnnnnnnnnnnnnnnnnnnnnnnnnnnnnnnnnnnnnnnnnnnnnnnnnnnnnnnnnnnnnnnnnnnnnnnnnnnnnnnnnnnnnnnnnnnnnnnnnnnnnnnnnnnnnnnnnnnnnnnnnnnnnnnnnnnnnnnnnnnnnnnnnnnnnnnnnnnnnnnnnnnnnnnnnnnnnnnnnnnnnnnnnnnnnnnnnnnnnnnnnnnnnnnnnnnnnnnnnnnnnnnnnnnnnnnnnnnnnnnnnnnnnnnnnnnnnnnnnnnnnnnnnnnnnnnnnnnnnnnnnnnnnnnnnnnnnnnnnnnnnnnnnnnnnnnnnnnnnnnnnnnnnnnnnnnnnnnnnnnnnnnnnnnnnnnnnnnnnnnnnnnnnnnnnnnnnnnnnnnnnnnnnnnnnnnnnnnnnnnnnnnnnnnnnnnnnnnnnnnnnnnnnnnnnnnnnnnnnnnnnnnnnnnnnnnnnnnnnnnnnnnnnnnnnnnnnnnnnnnnnnnnnnnnnnnnnnnnnnnnnnnnnnnnnnnnnnnnnnnnnnnnnnnnnnnnnnnnnnnnnnnnnnnnnnnnnnnnnnnnnnnnnnnnnnnnnnnnnnnnnnnnnnnnnnnnnnnnnnnnnnnnnnnnnnnnnnnnnnnnnnnnnnnnnnnnnnnnnnnnnnnnnnnnnnnnnnnnnnnnnnnnnnnnnnnnnnnnnnnnnnnnnnnnnnnnnnnnnnnnnnnnnnnnnnnnnnnnnnnnnnnnnnnnnnnnnnnnnnnnnnnnnnnnnnnnnnnnnnnnnnnnnnnnnnnnnnnnnnnnnnnnnnnnnnnnnnnnnnnnnnnnnnnnnnnnnnnnnnnnnnnnnnnnnnnnnnnnnnnnnnnnnnnnnnnnnnnnnnnnnnnnnnnnnnnnnnnnnnnnnnnnnnnnnnnnnnnnnnnnnnnnnnnnnnnnnnnnnnnnnnnnnnnnnnnnnnnnnnnnnnnnnnnnnnnnnnnnnnnnnnnnnnnnnnnnnnnnnnnnnnnnnnnnnnnnnnnnnnnnnnnnnnnnnnnnnnnnnnnnnnnnnnnnnnnnnnnnnnnnnnnnnnnnnnnnnnnnnnnnnnnnnnnnnnnnnnnnnnnnnnnnnnnnnnnnnnnnnnnnnnnnnnnnnnnnnnnnnnnnnnnnnnnnnnnnnnnnnnnnnnnnnnnnnnnnnnnnnnnnnnnnnnnnnnnnnnnnnnnnnnnnnnnnnnnnnnnnnnnnnnnnnnnnnnnnnnnnnnnnnnnnnnnnnnnnnnnnnnnnnnnnnnnnnnnnnnnnnnnnnnnnnnnnnnnnnnnnnnnnnnnnnnnnnnnnnnnnnnnnnnnnnnnnnnnnnnnnnnnnnnnnnnnnnnnnnnnnnnnnnnnnnnnnnnnnnnnnnnnnnnnnnnnnnnnnnnnnnnnnnnnnnnnnnnnnnnnnnnnnnnnnnnnnnnnnnnnnnnnnnnnnnnnnnnnnnnnnnnnnnnnnnnnnnnnnnnnnnnnnnnnnnnnnnnnnnnnnnnnnnnnnnnnnnnnnnnnnnnnnnnnnnnnnnnnnnnnnnnnnnnnnnnnnnnnnnnnnnnnnnnnnnnnnnnnnnnnnnnnnnnnnnnnnnnnnnnnnnnnnnnnnnnnnnnnnnnnnnnnnnnnnnnnnnnnnnnnnnnnnnnnnnnnnnnnnnnnnnnnnnnnnnnnnnnnnnnnnnnnnnnnnnnnnnnnnnnnnnnnnnnnnnnnnnnnnnnnnnnnnnnnnnnnnnnnnnnnnnnnnnnnnnnnnnnnnnnnnnnnnnnnnnnnnnnnnnnnnnnnnnnnnnnnnnnnnnnnnnnnnnnnnnnnnnnnnnnnnnnnnnnnnnnnnnnnnnnnnnnnnnnnnnnnnnnnnnnnnnnnnnnnnnnnnnnnnnnnnnnnnnnnnnnnnnnnnnnnnnnnnnnnnnnnnnnnnnnnnnnnnnnnnnnnnnnnnnnnnnnnnnnnnnnnnnnnnnnnnnnnnnnnnnnnnnnnnnnnnnnnnnnnnnnnnnnnnnnnnnnnnnnnnnnnnnnnnnnnnnnnnnnnnnnnnnnnnnnnnnnnnnnnnnnnnnnnnnnnnnnnnnnnnnnnnnnnnnnnnnnnnnnnnnnnnnnnnnnnnnnnnnnnnnnnnnnnnnnnnnnnnnnnnnnnnnnnnnnnnnnnnnnnnnnnnnnnnnnnnnnnnnnnnnnnnnnnnnnnnnnnnnnnnnnnnnnnnnnnnnnnnnnnnnnnnnnnnnnnnnnnnnnnnnnnnnnnnnnnnnnnnnnnnnnnnnnnnnnnnnnnnnnnnnnnnnnnnnnnnnnnnnnnnnnnnnnnnnnnnnnnnnnnnnnnnnnnnnnnnnnnnnnnnnnnnnnnnnnnnnnnnnnnnnnnnnnnnnnnnnnnnnnnnnnnnnnnnnnnnnnnnnnnnnnnnnnnnnnnnnnnnnnnnnnnnnnnnnnnnnnnnnnnnnnnnnnnnnnnnnnnnnnnnnnnnnnnnnnnnnnnnnnnnnnnnnnnnnnnnnnnnnnnnnnnnnnnnnnnnnnnnnnnnnnnnnnnnnnnnnnnnnnnnnnnnnnnnnnnnnnnnnnnnnnnnnnnnnnnnnnnnnnnnnnnnnnnnnnnnnnnnnnnnnnnnnnnnnnnnnnnnnnnnnnnnnnnnnnnnnnnnnnnnnnnnnnnnnnnnnnnnnnnnnnnnnnnnnnnnnnnnnnnnnnnnnnnnnnnnnnnnnnnnnnnnnnnnnnnnnnnnnnnnnnnnnnnnnnnnnnnnnnnnnnnnnnnnnnnnnnnnnnnnnnnnnnnnnnnnnnnnnnnnnnnnnnnnnnnnnnnnnnnnnnnnnnnnnnnnnnnnnnnnnnnnnnnnnnnnnnnnnnnnnnnnnnnnnnnnnnnnnnnnnnnnnnnnnnnnnnnnnnnnnnnnnnnnnnnnnnnnnnnnnnnnnnnnnnnnnnnnnnnnnnnnnnnnnnnnnnnnnnnnnnnnnnnnnnnnnnnnnnnnnnnnnnnnnnnnnnnnnnnnnnnnnnnnnnnnnnnnnnnnnnnnnnnnnnnnnnnnnnnnnnnnnnnnnnnnnnnnnnnnnnnnnnnnnnnnnnnnnnnnnnnnnnnnnnnnnnnnnnnnnnnnnnnnnnnnnnnnnnnnnnnnnnnnnnnnnnnnnnnnnnnnnnnnnnnnnnnnnnnnnnnnnnnnnnnnnnnnnnnnnnnnnnnnnnnnnnnnnnnnnnnnnnnnnnnnnnnnnnnnnnnnnnnnnnnnnnnnnnnnnnnnnnnnnnnnnnnnnnnnnnnnnnnnnnnnnnnnnnnnnnnnnnnnnnnnnnnnnnnnnnnnnnnnnnnnnnnnnnnnnnnnnnnnnnnnnnnnnnnnnnnnnnnnnnnnnnnnnnnnnnnnnnnnnnnnnnnnnnnnnnnnnnnnnnnnnnnnnnnnnnnnnnnnnnnnnnnnnnnnnnnnnnnnnnnnnnnnnnnnnnnnnnnnnnnnnnnnnnnnnnnnnnnnnnnnnnnnnnnnnnnnnnnnnnnnnnnnnnnnnnnnnnnnnnnnnnnnnnnnnnnnnnnnnnnnnnnnnnnnnnnnnnnnnnnnnnnnnnnnnnnnnnnnnnnnnnnnnnnnnnnnnnnnnnnnnnnnnnnnnnnnnnnnnnnnnnnnnnnnnnnnnnnnnnnnnnnnnnnnnnnnnnnnnnnnnnnnnnnnnnnnnnnnnnnnnnnnnnnnnnnnnnnnnnnnnnnnnnnnnnnnnnnnnnnnnnnnnnnnnnnnnnnnnnnnnnnnnnnnnnnnnnnnnnnnnnnnnnnnnnnnnnnnnnnnnnnnnnnnnnnnnnnnnnnnnnnnnnnnnnnnnnnnnnnnnnnnnnnnnnnnnnnnnnnnnnnnnnnnnnnnnnnnnnnnnnnnnnnnnnnnnnnnnnnnnnnnnnnnnnnnnnnnnnnnnnnnnnnnnnnnnnnnnnnnnnnnnnnnnnnnnnnnnnnnnnnnnnnnnnnnnnnnnnnnnnnnnnnnnnnnnnnnnnnnnnnnnnnnnnnnnnnnnnnnnnnnnnnnnnnnnnnnnnnnnnnnnnnnnnnnnnnnnnnnnnnnnnnnnnnnnnnnnnnnnnnnnnnnnnnnnnnnnnnnnnnnnnnnnnnnnnnnnnnnnnnnnnnnnnnnnnnnnnnnnnnnnnnnnnnnnnnnnnnnnnnnnnnnnnnnnnnnnnnnnnnnnnnnnnnnnnnnnnnnnnnnnnnnnnnnnnnnnnnnnnnnnnnnnnnnnnnnnnnnnnnnnnnnnnnnnnnnnnnnnnnnnnnnnnnnnnnnnnnnnnnnnnnnnnnnnnnnnnnnnnnnnnnnnnnnnnnnnnnnnnnnnnnnnnnnnnnnnnnnnnnnnnnnnnnnnnnnnnnnnnnnnnnnnnnnnnnnnnnnnnnnnnnnnnnnnnnnnnnnnnnnnnnnnnnnnnnnnnnnnnnnnnnnnnnnnnnnnnnnnnnnnnnnnnnnnnnnnnnnnnnnnnnnnnnnnnnnnnnnnnnnnnnnnnnnnnnnnnnnnnnnnnnnnnnnnnnnnnnnnnnnnnnnnnnnnnnnnnnnnnnnnnnnnnnnnnnnnnnnnnnnnnnnnnnnnnnnnnnnnnnnnnnnnnnnnnnnnnnnnnnnnnnnnnnnnnnnnnnnnnnnnnnnnnnnnnnnnnnnnnnnnnnnnnnnnnnnnnnnnnnnnnnnnnnnnnnnnnnnnnnnnnnnnnnnnnnnnnnnnnnnnnnnnnnnnnnnnnnnnnnnnnnnnnnnnnnnnnnnnnnnnnnnnnnnnnnnnnnnnnnnnnnnnnnnnnnnnnnnnnnnnnnnnnnnnnnnnnnnnnnnnnnnnnnnnnnnnnnnnnnnnnnnnnnnnnnnnnnnnnnnnnnnnnnnnnnnnnnnnnnnnnnnnnnnnnnnnnnnnnnnnnnnnnnnnnnnnnnnnnnnnnnnnnnnnnnnnnnnnnnnnnnnnnnnnnnnnnnnnnnnnnnnnnnnnnnnnnnnnnnnnnnnnnnnnnnnnnnnnnnnnnnnnnnnnnnnnnnnnnnnnnnnnnnnnnnnnnnnnnnnnnnnnnnnnnnnnnnnnnnnnnnnnnnnnnnnnnnnnnnnnnnnnnnnnnnnnnnnnnnnnnnnnnnnnnnnnnnnnnnnnnnnnnnnnnnnnnnnnnnnnnnnnnnnnnnnnnnnnnnnnnnnnnnnnnnnnnnnnnnnnnnnnnnnnnnnnnnnnnnnnnnnnnnnnnnnnnnnnnnnnnnnnnnnnnnnnnnnnnnnnnnnnnnnnnnnnnnnnnnnnnnnnnnnnnnnnnnnnnnnnnnnnnnnnnnnnnnnnnnnnnnnnnnnnnnnnnnnnnnnnnnnnnnnnnnnnnnnnnnnnnnnnnnnnnnnnnnnnnnnnnnnnnnnnnnnnnnnnnnnnnnnnnnnnnnnnnnnnnnnnnnnnnnnnnnnnnnnnnnnnnnnnnnnnnnnnnnnnnnnnnnnnnnnnnnnnnnnnnnnnnnnnnnnnnnnnnnnnnnnnnnnnnnnnnnnnnnnnnnnnnnnnnnnnnnnnnnnnnnnnnnnnnnnnnnnnnnnnnnnnnnnnnnnnnnnnnnnnnnnnnnnnnnnnnnnnnnnnnnnnnnnnnnnnnnnnnnnnnnnnnnnnnnnnnnnnnnnnnnnnnnnnnnnnnnnnnnnnnnnnnnnnnnnnnnnnnnnnnnnnnnnnnnnnnnnnnnnnnnnnnnnnnnnnnnnnnnnnnnnnnnnnnnnnnnnnnnnnnnnnnnnnnnnnnnnnnnnnnnnnnnnnnnnnnnnnnnnnnnnnnnnnnnnnnnnnnnnnnnnnnnnnnnnnnnnnnnnnnnnnnnnnnnnnnnnnnnnnnnnnnnnnnnnnnnnnnnnnnnnnnnnnnnnnnnnnnnnnnnnnnnnnnnnnnnnnnnnnnnnnnnnnnnnnnnnnnnnnnnnnnnnnnnnnnnnnnnnnnnnnnnnnnnnnnnnnnnnnnnnnnnnnnnnnnnnnnnnnnnnnnnnnnnnnnnnnnnnnnnnnnnnnnnnnnnnnnnnnnnnnnnnnnnnnnnnnnnnnnnnnnnnnnnnnnnnnnnnnnnnnnnnnnnnnnnnnnnnnnnnnnnnnnnnnnnnnnnnnnnnnnnnnnnnnnnnnnnnnnnnnnnnnnnnnnnnnnnnnnnnnnnnnnnnnnnnnnnnnnnnnnnnnnnnnnnnnnnnnnnnnnnnnnnnnnnnnnnnnnnnnnnnnnnnnnnnnnnnnnnnnnnnnnnnnnnnnnnnnnnnnnnnnnnnnnnnnnnnnnnnnnnnnnnnnnnnnnnnnnnnnnnnnnnnnnnnnnnnnnnnnnnnnnnnnnnnnnnnnnnnnnnnnnnnnnnnnnnnnnnnnnnnnnnnnnnnnnnnnnnnnnnnnnnnnnnnnnnnnnnnnnnnnnnnnnnnnnnnnnnnnnnnnnnnnnnnnnnnnnnnnnnnnnnnnnnnnnnnnnnnnnnnnnnnnnnnnnnnnnnnnnnnnnnnnnnnnnnnnnnnnnnnnnnnnnnnnnnnnnnnnnnnnnnnnnnnnnnnnnnnnnnnnnnnnnnnnnnnnnnnnnnnnnnnnnnnnnnnnnnnnnnnnnnnnnnnnnnnnnnnnnnnnnnnnnnnnnnnnnnnnnnnnnnnnnnnnnnnnnnnnnnnnnnnnnnnnnnnnnnnnnnnnnnnnnnnnnnnnnnnnnnnnnnnnnnnnnnnnnnnnnnnnnnnnnnnnnnnnnnnnnnnnnnnnnnnnnnnnnnnnnnnnnnnnnnnnnnnnnnnnnnnnnnnnnnnnnnnnnnnnnnnnnnnnnnnnnnnnnnnnnnnnnnnnnnnnnnnnnnnnnnnnnnnnnnnnnnnnnnnnnnnnnnnnnnnnnnnnnnnnnnnnnnnnnnnnnnnnnnnnnnnnnnnnnnnnnnnnnnnnnnnnnnnnnnnnnnnnnnnnnnnnnnnnnnnnnnnnnnnnnnnnnnnnnnnnnnnnnnnnnnnnnnnnnnnnnnnnnnnnnnnnnnnnnnnnnnnnnnnnnnnnnnnnnnnnnnnnnnnnnnnnnnnnnnnnnnnnnnnnnnnnnnnnnnnnnnnnnnnnnnnnnnnnnnnnnnnnnnnnnnnnnnnnnnnnnnnnnnnnnnnnnnnnnnnnnnnnnnnnnnnnnnnnnnnnnnnnnnnnnnnnnnnnnnnnnnnnnnnnnnnnnnnnnnnnnnnnnnnnnnnnnnnnnnnnnnnnnnnnnnnnnnnnnnnnnnnnnnnnnnnnnnnnnnnnnnnnnnnnnnnnnnnnnnnnnnnnnnnnnnnnnnnnnnnnnnnnnnnnnnnnnnnnnnnnnnnnnnnnnnnnnnnnnnnnnnnnnnnnnnnnnnnnnnnnnnnnnnnnnnnnnnnnnnnnnnnnnnnnnnnnnnnnnnnnnnnnnnnnnnnnnnnnnnnnnnnnnnnnnnnnnnnnnnnnnnnnnnnnnnnnnnnnnnnnnnnnnnnnnnnnnnnnnnnnnnnnnnnnnnnnnnnnnnnnnnnnnnnnnnnnnnnnnnnnnnnnnnnnnnnnnnnnnnnnnnnnnnnnnnnnnnnnnnnnnnnnnnnnnnnnnnnnnnnnnnnnnnnnnnnnnnnnnnnnnnnnnnnnnnnnnnnnnnnnnnnnnnnnnnnnnnnnnnnnnnnnnnnnnnnnnnnnnnnnnnnnnnnnnnnnnnnnnnnnnnnnnnnnnnnnnnnnnnnnnnnnnnnnnnnnnnnnnnnnnnnnnnnnnnnnnnnnnnnnnnnnnnnnnnnnnnnnnnnnnnnnnnnnnnnnnnnnnnnnnnnnnnnnnnnnnnnnnnnnnnnnnnnnnnnnnnnnnnnnnnnnnnnnnnnnnnnnnnnnnnnnnnnnnnnnnnnnnnnnnnnnnnnnnnnnnnnnnnnnnnnnnnnnnnnnnnnnnnnnnnnnnnnnnnnnnnnnnnnnnnnnnnnnnnnnnnnnnnnnnnnnnnnnnnnnnnnnnnnnnnnnnnnnnnnnnnnnnnnnnnnnnnnnnnnnnnnnnnnnnnnnnnnnnnnnnnnnnnnnnnnnnnnnnnnnnnnnnnnnnnnnnnnnnnnnnnnnnnnnnnnnnnnnnnnnnnnnnnnnnnnnnnnnnnnnnnnnnnnnnnnnnnnnnnnnnnnnnnnnnnnnnnnnnnnnnnnnnnnnnnnnnnnnnnnnnnnnnnnnnnnnnnnnnnnnnnnnnnnnnnnnnnnnnnnnnnnnnnnnnnnnnnnnnnnnnnnnnnnnnnnnnnnnnnnnnnnnnnnnnnnnnnnnnnnnnnnnnnnnnnnnnnnnnnnnnnnnnnnnnnnnnnnnnnnnnnnnnnnnnnnnnnnnnnnnnnnnnnnnnnnnnnnnnnnnnnnnnnnnnnnnnnnnnnnnnnnnnnnnnnnnnnnnnnnnnnnnnnnnnnnnnnnnnnnnnnnnnnnnnnnnnnnnnnnnnnnnnnnnnnnnnnnnnnnnnnnnnnnnnnnnnnnnnnnnnnnnnnnnnnnnnnnnnnnnnnnnnnnnnnnnnnnnnnnnnnnnnnnnnnnnnnnnnnnnnnnnnnnnnnnnnnnnnnnnnnnnnnnnnnnnnnnnnnnnnnnnnnnnnnnnnnnnnnnnnnnnnnnnnnnnnnnnnnnnnnnnnnnnnnnnnnnnnnnnnnnnnnnnnnnnnnnnnnnnnnnnnnnnnnnnnnnnnnnnnnnnnnnnnnnnnnnnnnnnnnnnnnnnnnnnnnnnnnnnnnnnnnnnnnnnnnnnnnnnnnnnnnnnnnnnnnnnnnnnnnnnnnnnnnnnnnnnnnnnnnnnnnnnnnnnnnnnnnnnnnnnnnnnnnnnnnnnnnnnnnnnnnnnnnnnnnnnnnnnnnnnnnnnnnnnnnnnnnnnnnnnnnnnnnnnnnnnnnnnnnnnnnnnnnnnnnnnnnnnnnnnnnnnnnnnnnnnnnnnnnnnnnnnnnnnnnnnnnnnnnnnnnnnnnnnnnnnnnnnnnnnnnnnnnnnnnnnnnnnnnnnnnnnnnnnnnnnnnnnnnnnnnnnnnnnnnnnnnnnnnnnnnnnnnnnnnnnnnnnnnnnnnnnnnnnnnnnnnnnnnnnnnnnnnnnnnnnnnnnnnnnnnnnnnnnnnnnnnnnnnnnnnnnnnnnnnnnnnnnnnnnnnnnnnnnnnnnnnnnnnnnnnnnnnnnnnnnnnnnnnnnnnnnnnnnnnnnnnnnnnnnnnnnnnnnnnnnnnnnnnnnnnnnnnnnnnnnnnnnnnnnnnnnnnnnnnnnnnnnnnnnnnnnnnnnnnnnnnnnnnnnnnnnnnnnnnnnnnnnnnnnnnnnnnnnnnnnnnnnnnnnnnnnnnnnnnnnnnnnnnnnnnnnnnnnnnnnnnnnnnnnnnnnnnnnnnnnnnnnnnnnnnnnnnnnnnnnnnnnnnnnnnnnnnnnnnnnnnnnnnnnnnnnnnnnnnnnnnnnnnnnnnnnnnnnnnnnnnnnnnnnnnnnnnnnnnnnnnnnnnnnnnnnnnnnnnnnnnnnnnnnnnnnnnnnnnnnnnnnnnnnnnnnnnnnnnnnnnnnnnnnnnnnnnnnnnnnnnnnnnnnnnnnnnnnnnnnnnnnnnnnnnnnnnnnnnnnnnnnnnnnnnnnnnnnnnnnnnnnnnnnnnnnnnnnnnnnnnnnnnnnnnnnnnnnnnnnnnnnnnnnnnnnnnnnnnnnnnnnnnnnnnnnnnnnnnnnnnnnnnnnnnnnnnnnnnnnnnnnnnnnnnnnnnnnnnnnnnnnnnnnnnnnnnnnnnnnnnnnnnnnnnnnnnnnnnnnnnnnnnnnnnnnnnnnnnnnnnnnnnnnnnnnnnnnnnnnnnnnnnnnnnnnnnnnnnnnnnnnnnnnnnnnnnnnnnnnnnnnnnnnnnnnnnnnnnnnnnnnnnnnnnnnnnnnnnnnnnnnnnnnnnnnnnnnnnnnnnnnnnnnnnnnnnnnnnnnnnnnnnnnnnnnnnnnnnnnnnnnnnnnnnnnnnnnnnnnnnnnnnnnnnnnnnnnnnnnnnnnnnnnnnnnnnnnnnnnnnnnnnnnnnnnnnnnnnnnnnnnnnnnnnnnnnnnnnnnnnnnnnnnnnnnnnnnnnnnnnnnnnnnnnnnnnnnnnnnnnnnnnnnnnnnnnnnnnnnnnnnnnnnnnnnnnnnnnnnnnnnnnnnnnnnnnnnnnnnnnnnnnnnnnnnnnnnnnnnnnnnnnnnnnnnnnnnnnnnnnnnnnnnnnnnnnnnnnnnnnnnnnnnnnnnnnnnnnnnnnnnnnnnnnnnnnnnnnnnnnnnnnnnnnnnnnnnnnnnnnnnnnnnnnnnnnnnnnnnnnnnnnnnnnnnnnnnnnnnnnnnnnnnnnnnnnnnnnnnnnnnnnnnnnnnnnnnnnnnnnnnnnnnnnnnnnnnnnnnnnnnnnnnnnnnnnnnnnnnnnnnnnnnnnnnnnnnnnnnnnnnnnnnnnnnnnnnnnnnnnnnnnnnnnnnnnnnnnnnnnnnnnnnnnnnnnnnnnnnnnnnnnnnnnnnnnnnnnnnnnnnnnnnnnnnnnnnnnnnnnnnnnnnnnnnnnnnnnnnnnnnnnnnnnnnnnnnnnnnnnnnnnnnnnnnnnnnnnnnnnnnnnnnnnnnnnnnnnnnnnnnnnnnnnnnnnnnnnnnnnnnnnnnnnnnnnnnnnnnnnnnnnnnnnnnnnnnnnnnnnnnnnnnnnnnnnnnnnnnnnnnnnnnnnnnnnnnnnnnnnnnnnnnnnnnnnnnnnnnnnnnnnnnnnnnnnnnnnnnnnnnnnnnnnnnnnnnnnnnnnnnnnnnnnnnnnnnnnnnnnnnnnnnnnnnnnnnnnnnnnnnnnnnnnnnnnnnnnnnnnnnnnnnnnnnnnnnnnnnnnnnnnnnnnnnnnnnnnnnnnnnnnnnnnnnnnnnnnnnnnnnnnnnnnnnnnnnnnnnnnnnnnnnnnnnnnnnnnnnnnnnnnnnnnnnnnnnnnnnnnnnnnnnnnnnnnnnnnnnnnnnnnnnnnnnnnnnnnnnnnnnnnnnnnnnnnnnnnnnnnnnnnnnnnnnnnnnnnnnnnnnnnnnnnnnnnnnnnnnnnnnnnnnnnnnnnnnnnnnnnnnnnnnnnnnnnnnnnnnnnnnnnnnnnnnnnnnnnnnnnnnnnnnnnnnnnnnnnnnnnnnnnnnnnnnnnnnnnnnnnnnnnnnnnnnnnnnnnnnnnnnnnnnnnnnnnnnnnnnnnnnnnnnnnnnnnnnnnnnnnnnnnnnnnnnnnnnnnnnnnnnnnnnnnnnnnnnnnnnnnnnnnnnnnnnnnnnnnnnnnnnnnnnnnnnnnnnnnnnnnnnnnnnnnnnnnnnnnnnnnnnnnnnnnnnnnnnnnnnnnnnnnnnnnnnnnnnnnnnnnnnnnnnnnnnnnnnnnnnnnnnnnnnnnnnnnnnnnnnnnnnnnnnnnnnnnnnnnnnnnnnnnnnnnnnnnnnnnnnnnnnnnnnnnnnnnnnnnnnnnnnnnnnnnnnnnnnnnnnnnnnnnnnnnnnnnnnnnnnnnnnnnnnnnnnnnnnnnnnnnnnnnnnnnnnnnnnnnnnnnnnnnnnnnnnnnnnnnnnnnnnnnnnnnnnnnnnnnnnnnnnnnnnnnnnnnnnnnnnnnnnnnnnnnnnnnnnnnnnnnnnnnnnnnnnnnnnnnnnnnnnnnnnnnnnnnnnnnnnnnnnnnnnnnnnnnnnnnnnnnnnnnnnnnnnnnnnnnnnnnnnnnnnnnnnnnnnnnnnnnnnnnnnnnnnnnnnnnnnnnnnnnnnnnnnnnnnnnnnnnnnnnnnnnnnnnnnnnnnnnnnnnnnnnnnnnnnnnnnnnnnnnnnnnnnnnnnnnnnnnnnnnnnnnnnnnnnnnnnnnnnnnnnnnnnnnnnnnnnnnnnnnnnnnnnnnnnnnnnnnnnnnnnnnnnnnnnnnnnnnnnnnnnnnnnnnnnnnnnnnnnnnnnnnnnnnnnnnnnnnnnnnnnnnnnnnnnnnnnnnnnnnnnnnnnnnnnnnnnnnnnnnnnnnnnnnnnnnnnnnnnnnnnnnnnnnnnnnnnnnnnnnnnnnnnnnnnnnnnnnnnnnnnnnnnnnnnnnnnnnnnnnnnnnnnnnnnnnnnnnnnnnnnnnnnnnnnnnnnnnnnnnnnnnnnnnnnnnnnnnnnnnnnnnnnnnnnnnnnnnnnnnnnnnnnnnnnnnnnnnnnnnnnnnnnnnnnnnnnnnnnnnnnnnnnnnnnnnnnnnnnnnnnnnnnnnnnnnnnnnnnnnnnnnnnnnnnnnnnnnnnnnnnnnnnnnnnnnnnnnnnnnnnnnnnnnnnnnnnnnnnnnnnnnnnnnnnnnnnnnnnnnnnnnnnnnnnnnnnnnnnnnnnnnnnnnnnnnnnnnnnnnnnnnnnnnnnnnnnnnnnnnnnnnnnnnnnnnnnnnnnnnnnnnnnnnnnnnnnnnnnnnnnnnnnnnnnnnnnnnnnnnnnnnnnnnnnnnnnnnnnnnnnnnnnnnnnnnnnnnnnnnnnnnnnnnnnnnnnnnnnnnnnnnnnnnnnnnnnnnnnnnnnnnnnnnnnnnnnnnnnnnnnnnnnnnnnnnnnnnnnnnnnnnnnnnnnnnnnnnnnnnnnnnnnnnnnnnnnnnnnnnnnnnnnnnnnnnnnnnnnnnnnnnnnnnnnnnnnnnnnnnnnnnnnnnnnnnnnnnnnnnnnnnnnnnnnnnnnnnnnnnnnnnnnnnnnnnnnnnnnnnnnnnnnnnnnnnnnnnnnnnnnnnnnnnnnnnnnnnnnnnnnnnnnnnnnnnnnnnnnnnnnnnnnnnnnnnnnnnnnnnnnnnnnnnnnnnnnnnnnnnnnnnnnnnnnnnnnnnnnnnnnnnnnnnnnnnnnnnnnnnnnnnnnnnnnnnnnnnnnnnnnnnnnnnnnnnnnnnnnnnnnnnnnnnnnnnnnnnnnnnnnnnnnnnnnnnnnnnnnnnnnnnnnnnnnnnnnnnnnnnnnnnnnnnnnnnnnnnnnnnnnnnnnnnnnnnnnnnnnnnnnnnnnnnnnnnnnnnnnnnnnnnnnnnnnnnnnnnnnnnnnnnnnnnnnnnnnnnnnnnnnnnnnnnnnnnnnnnnnnnnnnnnnnnnnnnnnnnnnnnnnnnnnnnnnnnnnnnnnnnnnnnnnnnnnnnnnnnnnnnnnnnnnnnnnnnnnnnnnnnnnnnnnnnnnnnnnnnnnnnnnnnnnnnnnnnnnnnnnnnnnnnnnnnnnnnnnnnnnnnnnnnnnnnnnnnnnnnnnnnnnnnnnnnnnnnnnnnnnnnnnnnnnnnnnnnnnnnnnnnnnnnnnnnnnnnnnnnnnnnnnnnnnnnnnnnnnnnnnnnnnnnnnnnnnnnnnnnnnnnnnnnnnnnnnnnnnnnnnnnnnnnnnnnnnnnnnnnnnnnnnnnnnnnnnnnnnnnnnnnnnnnnnnnnnnnnnnnnnnnnnnnnnnnnnnnnnnnnnnnnnnnnnnnnnnnnnnnnnnnnnnnnnnnnnnnnnnnnnnnnnnnnnnnnnnnnnnnnnnnnnnnnnnnnnnnnnnnnnnnnnnnnnnnnnnnnnnnnnnnnnnnnnnnnnnnnnnnnnnnnnnnnnnnnnnnnnnnnnnnnnnnnnnnnnnnnnnnnnnnnnnnnnnnnnnnnnnnnnnnnnnnnnnnnnnnnnnnnnnnnnnnnnnnnnnnnnnnnnnnnnnnnnnnnnnnnnnnnnnnnnnnnnnnnnnnnnnnnnnnnnnnnnnnnnnnnnnnnnnnnnnnnnnnnnnnnnnnnnnnnnnnnnnnnnnnnnnnnnnnnnnnnnnnnnnnnnnnnnnnnnnnnnnnnnnnnnnnnnnnnnnnnnnnnnnnnnnnnnnnnnnnnnnnnnnnnnnnnnnnnnnnnnnnnnnnnnnnnnnnnnnnnnnnnnnnnnnnnnnnnnnnnnnnnnnnnnnnnnnnnnnnnnnnnnnnnnnnnnnnnnnnnnnnnnnnnnnnnnnnnnnnnnnnnnnnnnnnnnnnnnnnnnnnnnnnnnnnnnnnnnnnnnnnnnnnnnnnnnnnnnnnnnnnnnnnnnnnnnnnnnnnnnnnnnnnnnnnnnnnnnnnnnnnnnnnnnnnnnnnnnnnnnnnnnnnnnnnnnnnnnnnnnnnnnnnnnnnnnnnnnnnnnnnnnnnnnnnnnnnnnnnnnnnnnnnnnnnnnnnnnnnnnnnnnnnnnnnnnnnnnnnnnnnnnnnnnnnnnnnnnnnnnnnnnnnnnnnnnnnnnnnnnnnnnnnnnnnnnnnnnnnnnnnnnnnnnnnnnnnnnnnnnnnnnnnnnnnnnnnnnnnnnnnnnnnnnnnnnnnnnnnnnnnnnnnnnnnnnnnnnnnnnnnnnnnnnnnnnnnnnnnnnnnnnnnnnnnnnnnnnnnnnnnnnnnnnnnnnnnnnnnnnnnnnnnnnnnnnnnnnnnnnnnnnnnnnnnnnnnnnnnnnnnnnnnnnnnnnnnnnnnnnnnnnnnnnnnnnnnnnnnnnnnnnnnnnnnnnnnnnnnnnnnnnnnnnnnnnnnnnnnnnnnnnnnnnnnnnnnnnnnnnnnnnnnnnnnnnnnnnnnnnnnnnnnnnnnnnnnnnnnnnnnnnnnnnnnnnnnnnnnnnnnnnnnnnnnnnnnnnnnnnnnnnnnnnnnnnnnnnnnnnnnnnnnnnnnnnnnnnnnnnnnnnnnnnnnnnnnnnnnnnnnnnnnnnnnnnnnnnnnnnnnnnnnnnnnnnnnnnnnnnnnnnnnnnnnnnnnnnnnnnnnnnnnnnnnnnnnnnnnnnnnnnnnnnnnnnnnnnnnnnnnnnnnnnnnnnnnnnnnnnnnnnnnnnnnnnnnnnnnnnnnnnnnnnnnnnnnnnnnnnnnnnnnnnnnnnnnnnnnnnnnnnnnnnnnnnnnnnnnnnnnnnnnnnnnnnnnnnnnnnnnnnnnnnnnnnnnnnnnnnnnnnnnnnnnnnnnnnnnnnnnnnnnnnnnnnnnnnnnnnnnnnnnnnnnnnnnnnnnnnnnnnnnnnnnnnnnnnnnnnnnnnnnnnnnnnnnnnnnnnnnnnnnnnnnnnnnnnnnnnnnnnnnnnnnnnnnnnnnnnnnnnnnnnnnnnnnnnnnnnnnnnnnnnnnnnnnnnnnnnnnnnnnnnnnnnnnnnnnnnnnnnnnnnnnnnnnnnnnnnnnnnnnnnnnnnnnnnnnnnnnnnnnnnnnnnnnnnnnnnnnnnnnnnnnnnnnnnnnnnnnnnnnnnnnnnnnnnnnnnnnnnnnnnnnnnnnnnnnnnnnnnnnnnnnnnnnnnnnnnnnnnnnnnnnnnnnnnnnnnnnnnnnnnnnnnnnnnnnnnnnnnnnnnnnnnnnnnnnnnnnnnnnnnnnnnnnnnnnnnnnnnnnnnnnnnnnnnnnnnnnnnnnnnnnnnnnnnnnnnnnnnnnnnnnnnnnnnnnnnnnnnnnnnnnnnnnnnnnnnnnnnnnnnnnnnnnnnnnnnnnnnnnnnnnnnnnnnnnnnnnnnnnnnnnnnnnnnnnnnnnnnnnnnnnnnnnnnnnnnnnnnnnnnnnnnnnnnnnnnnnnnnnnnnnnnnnnnnnnnnnnnnnnnnnnnnnnnnnnnnnnnnnnnnnnnnnnnnnnnnnnnnnnnnnnnnnnnnnnnnnnnnnnnnnnnnnnnnnnnnnnnnnnnnnnnnnnnnnnnnnnnnnnnnnnnnnnnnnnnnnnnnnnnnnnnnnnnnnnnnnnnnnnnnnnnnnnnnnnnnnnnnnnnnnnnnnnnnnnnnnnnnnnnnnnnnnnnnnnnnnnnnnnnnnnnnnnnnnnnnnnnnnnnnnnnnnnnnnnnnnnnnnnnnnnnnnnnnnnnnnnnnnnnnnnnnnnnnnnnnnnnnnnnnnnnnnnnnnnnnnnnnnnnnnnnnnnnnnnnnnnnnnnnnnnnnnnnnnnnnnnnnnnnnnnnnnnnnnnnnnnnnnnnnnnnnnnnnnnnnnnnnnnnnnnnnnnnnnnnnnnnnnnnnnnnnnnnnnnnnnnnnnnnnnnnnnnnnnnnnnnnnnnnnnnnnnnnnnnnnnnnnnnnnnnnnnnnnnnnnnnnnnnnnnnnnnnnnnnnnnnnnnnnnnnnnnnnnnnnnnnnnnnnnnnnnnnnnnnnnnnnnnnnnnnnnnnnnnnnnnnnnnnnnnnnnnnnnnnnnnnnnnnnnnnnnnnnnnnnnnnnnnnnnnnnnnnnnnnnnnnnnnnnnnnnnnnnnnnnnnnnnnnnnnnnnnnnnnnnnnnnnnnnnnnnnnnnnnnnnnnnnnnnnnnnnnnnnnnnnnnnnnnnnnnnnnnnnnnnnnnnnnnnnnnnnnnnnnnnnnnnnnnnnnnnnnnnnnnnnnnnnnnnnnnnnnnnnnnnnnnnnnnnnnnnnnnnnnnnnnnnnnnnnnnnnnnnnnnnnnnnnnnnnnnnnnnnnnnnnnnnnnnnnnnnnnnnnnnnnnnnnnnnnnnnnnnnnnnnnnnnnnnnnnnnnnnnnnnnnnnnnnnnnnnnnnnnnnnnnnnnnnnnnnnnnnnnnnnnnnnnnnnnnnnnnnnnnnnnnnnnnnnnnnnnnnnnnnnnnnnnnnnnnnnnnnnnnnnnnnnnnnnnnnnnnnnnnnnnnnnnnnnnnnnnnnnnnnnnnnnnnnnnnnnnnnnnnnnnnnnnnnnnnnnnnnnnnnnnnnnnnnnnnnnnnnnnnnnnnnnnnnnnnnnnnnnnnnnnnnnnnnnnnnnnnnnnnnnnnnnnnnnnnnnnnnnnnnnnnnnnnnnnnnnnnnnnnnnnnnnnnnnnnnnnnnnnnnnnnnnnnnnnnnnnnnnnnnnnnnnnnnnnnnnnnnnnnnnnnnnnnnnnnnnnnnnnnnnnnnnnnnnnnnnnnnnnnnnnnnnnnnnnnnnnnnnnnnnnnnnnnnnnnnnnnnnnnnnnnnnnnnnnnnnnnnnnnnnnnnnnnnnnnnnnnnnnnnnnnnnnnnnnnnnnnnnnnnnnnnnnnnnnnnnnnnnnnnnnnnnnnnnnnnnnnnnnnnnnnnnnnnnnnnnnnnnnnnnnnnnnnnnnnnnnnnnnnnnnnnnnnnnnnnnnnnnnnnnnnnnnnnnnnnnnnnnnnnnnnnnnnnnnnnnnnnnnnnnnnnnnnnnnnnnnnnnnnnnnnnnnnnnnnnnnnnnnnnnnnnnnnnnnnnnnnnnnnnnnnnnnnnnnnnnnnnnnnnnnnnnnnnnnnnnnnnnnnnnnnnnnnnnnnnnnnnnnnnnnnnnnnnnnnnnnnnnnnnnnnnnnnnnnnnnnnnnnnnnnnnnnnnnnnnnnnnnnnnnnnnnnnnnnnnnnnnnnnnnnnnnnnnnnnnnnnnnnnnnnnnnnnnnnnnnnnnnnnnnnnnnnnnnnnnnnnnnnnnnnnnnnnnnnnnnnnnnnnnnnnnnnnnnnnnnnnnnnnnnnnnnnnnnnnnnnnnnnnnnnnnnnnnnnnnnnnnnnnnnnnnnnnnnnnnnnnnnnnnnnnnnnnnnnnnnnnnnnnnnnnnnnnnnnnnnnnnnnnnnnnnnnnnnnnnnnnnnnnnnnnnnnnnnnnnnnnnnnnnnnnnnnnnnnnnnnnnnnnnnnnnnnnnnnnnnnnnnnnnnnnnnnnnnnnnnnnnnnnnnnnnnnnnnnnnnnnnnnnnnnnnnnnnnnnnnnnnnnnnnnnnnnnnnnnnnnnnnnnnnnnnnnnnnnnnnnnnnnnnnnnnnnnnnnnnnnnnnnnnnnnnnnnnnnnnnnnnnnnnnnnnnnnnnnnnnnnnnnnnnnnnnnnnnnnnnnnnnnnnnnnnnnnnnnnnnnnnnnnnnnnnnnnnnnnnnnnnnnnnnnnnnnnnnnnnnnnnnnnnnnnnnnnnnnnnnnnnnnnnnnnnnnnnnnnnnnnnnnnnnnnnnnnnnnnnnnnnnnnnnnnnnnnnnnnnnnnnnnnnnnnnnnnnnnnnnnnnnnnnnnnnnnnnnnnnnnnnnnnnnnnnnnnnnnnnnnnnnnnnnnnnnnnnnnnnnnnnnnnnnnnnnnnnnnnnnnnnnnnnnnnnnnnnnnnnnnnnnnnnnnnnnnnnnnnnnnnnnnnnnnnnnnnnnnnnnnnnnnnnnnnnnnnnnnnnnnnnnnnnnnnnnnnnnnnnnnnnnnnnnnnnnnnnnnnnnnnnnnnnnnnnnnnnnnnnnnnnnnnnnnnnnnnnnnnnnnnnnnnnnnnnnnnnnnnnnnnnnnnnnnnnnnnnnnnnnnnnnnnnnnnnnnnnnnnnnnnnnnnnnnnnnnnnnnnnnnnnnnnnnnnnnnnnnnnnnnnnnnnnnnnnnnnnnnnnnnnnnnnnnnnnnnnnnnnnnnnnnnnnnnnnnnnnnnnnnnnnnnnnnnnnnnnnnnnnnnnnnnnnnnnnnnnnnnnnnnnnnnnnnnnnnnnnnnnnnnnnnnnnnnnnnnnnnnnnnnnnnnnnnnnnnnnnnnnnnnnnnnnnnnnnnnnnnnnnnnnnnnnnnnnnnnnnnnnnnnnnnnnnnnnnnnnnnnnnnnnnnnnnnnnnnnnnnnnnnnnnnnnnnnnnnnnnnnnnnnnnnnnnnnnnnnnnnnnnnnnnnnnnnnnnnnnnnnnnnnnnnnnnnnnnnnnnnnnnnnnnnnnnnnnnnnnnnnnnnnnnnnnnnnnnnnnnnnnnnnnnnnnnnnnnnnnnnnnnnnnnnnnnnnnnnnnnnnnnnnnnnnnnnnnnnnnnnnnnnnnnnnnnnnnnnnnnnnnnnnnnnnnnnnnnnnnnnnnnnnnnnnnnnnnnnnnnnnnnnnnnnnnnnnnnnnnnnnnnnnnnnnnnnnnnnnnnnnnnnnnnnnnnnnnnnnnnnnnnnnnnnnnnnnnnnnnnnnnnnnnnnnnnnnnnnnnnnnnnnnnnnnnnnnnnnnnnnnnnnnnnnnnnnnnnnnnnnnnnnnnnnnnnnnnnnnnnnnnnnnnnnnnnnnnnnnnnnnnnnnnnnnnnnnnnnnnnnnnnnnnnnnnnnnnnnnnnnnnnnnnnnnnnnnnnnnnnnnnnnnnnnnnnnnnnnnnnnnnnnnnnnnnnnnnnnnnnnnnnnnnnnnnnnnnnnnnnnnnnnnnnnnnnnnnnnnnnnnnnnnnnnnnnnnnnnnnnnnnnnnnnnnnnnnnnnnnnnnnnnnnnnnnnnnnnnnnnnnnnnnnnnnnnnnnnnnnnnnnnnnnnnnnnnnnnnnnnnnnnnnnnnnnnnnnnnnnnnnnnnnnnnnnnnnnnnnnnnnnnnnnnnnnnnnnnnnnnnnnnnnnnnnnnnnnnnnnnnnnnnnnnnnnnnnnnnnnnnnnnnnnnnnnnnnnnnnnnnnnnnnnnnnnnnnnnnnnnnnnnnnnnnnnnnnnnnnnnnnnnnnnnnnnnnnnnnnnnnnnnnnnnnnnnnnnnnnnnnnnnnnnnnnnnnnnnnnnnnnnnnnnnnnnnnnnnnnnnnnnnnnnnnnnnnnnnnnnnnnnnnnnnnnnnnnnnnnnnnnnnnnnnnnnnnnnnnnnnnnnnnnnnnnnnnnnnnnnnnnnnnnnnnnnnnnnnnnnnnnnnnnnnnnnnnnnnnnnnnnnnnnnnnnnnnnnnnnnnnnnnnnnnnnnnnnnnnnnnnnnnnnnnnnnnnnnnnnnnnnnnnnnnnnnnnnnnnnnnnnnnnnnnnnnnnnnnnnnnnnnnnnnnnnnnnnnnnnnnnnnnnnnnnnnnnnnnnnnnnnnnnnnnnnnnnnnnnnnnnnnnnnnnnnnnnnnnnnnnnnnnnnnnnnnnnnnnnnnnnnnnnnnnnnnnnnnnnnnnnnnnnnnnnnnnnnnnnnnnnnnnnnnnnnnnnnnnnnnnnnnnnnnnnnnnnnnnnnnnnnnnnnnnnnnnnnnnnnnnnnnnnnnnnnnnnnnnnnnnnnnnnnnnnnnnnnnnnnnnnnnnnnnnnnnnnnnnnnnnnnnnnnnnnnnnnnnnnnnnnnnnnnnnnnnnnnnnnnnnnnnnnnnnnnnnnnnnnnnnnnnnnnnnnnnnnnnnnnnnnnnnnnnnnnnnnnnnnnnnnnnnnnnnnnnnnnnnnnnnnnnnnnnnnnnnnnnnnnnnnnnnnnnnnnnnnnnnnnnnnnnnnnnnnnnnnnnnnnnnnnnnnnnnnnnnnnnnnnnnnnnnnnnnnnnnnnnnnnnnnnnnnnnnnnnnnnnnnnnnnnnnnnnnnnnnnnnnnnnnnnnnnnnnnnnnnnnnnnnnnnnnnnnnnnnnnnnnnnnnnnnnnnnnnnnnnnnnnnnnnnnnnnnnnnnnnnnnnnnnnnnnnnnnnnnnnnnnnnnnnnnnnnnnnnnnnnnnnnnnnnnnnnnnnnnnnnnnnnnnnnnnnnnnnnnnnnnnnnnnnnnnnnnnnnnnnnnnnnnnnnnnnnnnnnnnnnnnnnnnnnnnnnnnnnnnnnnnnnnnnnnnnnnnnnnnnnnnnnnnnnnnnnnnnnnnnnnnnnnnnnnnnnnnnnnnnnnnnnnnnnnnnnnnnnnnnnnnnnnnnnnnnnnnnnnnnnnnnnnnnnnnnnnnnnnnnnnnnnnnnnnnnnnnnnnnnnnnnnnnnnnnnnnnnnnnnnnnnnnnnnnnnnnnnnnnnnnnnnnnnnnnnnnnnnnnnnnnnnnnnnnnnnnnnnnnnnnnnnnnnnnnnnnnnnnnnnnnnnnnnnnnnnnnnnnnnnnnnnnnnnnnnnnnnnnnnnnnnnnnnnnnnnnnnnnnnnnnnnnnnnnnnnnnnnnnnnnnnnnnnnnnnnnnnnnnnnnnnnnnnnnnnnnnnnnnnnnnnnnnnnnnnnnnnnnnnnnnnnnnnnnnnnnnnnnnnnnnnnnnnnnnnnnnnnnnnnnnnnnnnnnnnnnnnnnnnnnnnnnnnnnnnnnnnnnnnnnnnnnnnnnnnnnnnnnnnnnnnnnnnnnnnnnnnnnnnnnnnnnnnnnnnnnnnnnnnnnnnnnnnnnnnnnnnnnnnnnnnnnnnnnnnnnnnnnnnnnnnnnnnnnnnnnnnnnnnnnnnnnnnnnnnnnnnnnnnnnnnnnnnnnnnnnnnnnnnnnnnnnnnnnnnnnnnnnnnnnnnnnnnnnnnnnnnnnnnnnnnnnnnnnnnnnnnnnnnnnnnnnnnnnnnnnnnnnnnnnnnnnnnnnnnnnnnnnnnnnnnnnnnnnnnnnnnnnnnnnnnnnnnnnnnnnnnnnnnnnnnnnnnnnnnnnnnnnnnnnnnnnnnnnnnnnnnnnnnnnnnnnnnnnnnnnnnnnnnnnnnnnnnnnnnnnnnnnnnnnnnnnnnnnnnnnnnnnnnnnnnnnnnnnnnnnnnnnnnnnnnnnnnnnnnnnnnnnnnnnnnnnnnnnnnnnnnnnnnnnnnnnnnnnnnnnnnnnnnnnnnnnnnnnnnnnnnnnnnnnnnnnnnnnnnnnnnnnnnnnnnnnnnnnnnnnnnnnnnnnnnnnnnnnnnnnnnnnnnnnnnnnnnnnnnnnnnnnnnnnnnnnnnnnnnnnnnnnnnnnnnnnnnnnnnnnnnnnnnnnnnnnnnnnnnnnnnnnnnnnnnnnnnnnnnnnnnnnnnnnnnnnnnnnnnnnnnnnnnnnnnnnnnnnnnnnnnnnnnnnnnnnnnnnnnnnnnnnnnnnnnnnnnnnnnnnnnnnnnnnnnnnnnnnnnnnnnnnnnnnnnnnnnnnnnnnnnnnnnnnnnnnnnnnnnnnnnnnnnnnnnnnnnnnnnnnnnnnnnnnnnnnnnnnnnnnnnnnnnnnnnnnnnnnnnnnnnnnnnnnnnnnnnnnnnnnnnnnnnnnnnnnnnnnnnnnnnnnnnnnnnnnnnnnnnnnnnnnnnnnnnnnnnnnnnnnnnnnnnnnnnnnnnnnnnnnnnnnnnnnnnnnnnnnnnnnnnnnnnnnnnnnnnnnnnnnnnnnnnnnnnnnnnnnnnnnnnnnnnnnnnnnnnnnnnnnnnnnnnnnnnnnnnnnnnnnnnnnnnnnnnnnnnnnnnnnnnnnnnnnnnnnnnnnnnnnnnnnnnnnnnnnnnnnnnnnnnnnnnnnnnnnnnnnnnnnnnnnnnnnnnnnnnnnnnnnnnnnnnnnnnnnnnnnnnnnnnnnnnnnnnnnnnnnnnnnnnnnnnnnnnnnnnnnnnnnnnnnnnnnnnnnnnnnnnnnnnnnnnnnnnnnnnnnnnnnnnnnnnnnnnnnnnnnnnnnnnnnnnnnnnnnnnnnnnnnnnnnnnnnnnnnnnnnnnnnnnnnnnnnnnnnnnnnnnnnnnnnnnnnnnnnnnnnnnnnnnnnnnnnnnnnnnnnnnnnnnnnnnnnnnnnnnnnnnnnnnnnnnnnnnnnnnnnnnnnnnnnnnnnnnnnnnnnnnnnnnnnnnnnnnnnnnnnnnnnnnnnnnnnnnnnnnnnnnnnnnnnnnnnnnnnnnnnnnnnnnnnnnnnnnnnnnnnnnnnnnnnnnnnnnnnnnnnnnnnnnnnnnnnnnnnnnnnnnnnnnnnnnnnnnnnnnnnnnnnnnnnnnnnnnnnnnnnnnnnnnnnnnnnnnnnnnnnnnnnnnnnnnnnnnnnnnnnnnnnnnnnnnnnnnnnnnnnnnnnnnnnnnnnnnnnnnnnnnnnnnnnnnnnnnnnnnnnnnnnnnnnnnnnnnnnnnnnnnnnnnnnnnnnnnnnnnnnnnnnnnnnnnnnnnnnnnnnnnnnnnnnnnnnnnnnnnnnnnnnnnnnnnnnnnnnnnnnnnnnnnnnnnnnnnnnnnnnnnnnnnnnnnnnnnnnnnnnnnnnnnnnnnnnnnnnnnnnnnnnnnnnnnnnnnnnnnnnnnnnnnnnnnnnnnnnnnnnnnnnnnnnnnnnnnnnnnnnnnnnnnnnnnnnnnnnnnnnnnnnnnnnnnnnnnnnnnnnnnnnnnnnnnnnnnnnnnnnnnnnnnnnnnnnnnnnnnnnnnnnnnnnnnnnnnnnnnnnnnnnnnnnnnnnnnnnnnnnnnnnnnnnnnnnnnnnnnnnnnnnnnnnnnnnnnnnnnnnnnnnnnnnnnnnnnnnnnnnnnnnnnnnnnnnnnnnnnnnnnnnnnnnnnnnnnnnnnnnnnnnnnnnnnnnnnnnnnnnnnnnnnnnnnnnnnnnnnnnnnnnnnnnnnnnnnnnnnnnnnnnnnnnnnnnnnnnnnnnnnnnnnnnnnnnnnnnnnnnnnnnnnnnnnnnnnnnnnnnnnnnnnnnnnnnnnnnnnnnnnnnnnnnnnnnnnnnnnnnnnnnnnnnnnnnnnnnnnnnnnnnnnnnnnnnnnnnnnnnnnnnnnnnnnnnnnnnnnnnnnnnnnnnnnnnnnnnnnnnnnnnnnnnnnnnnnnnnnnnnnnnnnnnnnnnnnnnnnnnnnnnnnnnnnnnnnnnnnnnnnnnnnnnnnnnnnnnnnnnnnnnnnnnnnnnnnnnnnnnnnnnnnnnnnnnnnnnnnnnnnnnnnnnnnnnnnnnnnnnnnnnnnnnnnnnnnnnnnnnnnnnnnnnnnnnnnnnnnnnnnnnnnnnnnnnnnnnnnnnnnnnnnnnnnnnnnnnnnnnnnnnnnnnnnnnnnnnnnnnnnnnnnnnnnnnnnnnnnnnnnnnnnnnnnnnnnnnnnnnnnnnnnnnnnnnnnnnnnnnnnnnnnnnnnnnnnnnnnnnnnnnnnnnnnnnnnnnnnnnnnnnnnnnnnnnnnnnnnnnnnnnnnnnnnnnnnnnnnnnnnnnnnnnnnnnnnnnnnnnnnnnnnnnnnnnnnnnnnnnnnnnnnnnnnnnnnnnnnnnnnnnnnnnnnnnnnnnnnnnnnnnnnnnnnnnnnnnnnnnnnnnnnnnnnnnnnnnnnnnnnnnnnnnnnnnnnnnnnnnnnnnnnnnnnnnnnnnnnnnnnnnnnnnnnnnnnnnnnnnnnnnnnnnnnnnnnnnnnnnnnnnnnnnnnnnnnnnnnnnnnnnnnnnnnnnnnnnnnnnnnnnnnnnnnnnnnnnnnnnnnnnnnnnnnnnnnnnnnnnnnnnnnnnnnnnnnnnnnnnnnnnnnnnnnnnnnnnnnnnnnnnnnnnnnnnnnnnnnnnnnnnnnnnnnnnnnnnnnnnnnnnnnnnnnnnnnnnnnnnnnnnnnnnnnnnnnnnnnnnnnnnnnnnnnnnnnnnnnnnnnnnnnnnnnnnnnnnnnnnnnnnnnnnnnnnnnnnnnnnnnnnnnnnnnnnnnnnnnnnnnnnnnnnnnnnnnnnnnnnnnnnnnnnnnnnnnnnnnnnnnnnnnnnnnnnnnnnnnnnnnnnnnnnnnnnnnnnnnnnnnnnnnnnnnnnnnnnnnnnnnnnnnnnnnnnnnnnnnnnnnnnnnnnnnnnnnnnnnnnnnnnnnnnnnnnnnnnnnnnnnnnnnnnnnnnnnnnnnnnnnnnnnnnnnnnnnnnnnnnnnnnnnnnnnnnnnnnnnnnnnnnnnnnnnnnnnnnnnnnnnnnnnnnnnnnnnnnnnnnnnnnnnnnnnnnnnnnnnnnnnnnnnnnnnnnnnnnnnnnnnnnnnnnnnnnnnnnnnnnnnnnnnnnnnnnnnnnnnnnnnnnnnnnnnnnnnnnnnnnnnnnnnnnnnnnnnnnnnnnnnnnnnnnnnnnnnnnnnnnnnnnnnnnnnnnnnnnnnnnnnnnnnnnnnnnnnnnnnnnnnnnnnnnnnnnnnnnnnnnnnnnnnnnnnnnnnnnnnnnnnnnnnnnnnnnnnnnnnnnnnnnnnnnnnnnnnnnnnnnnnnnnnnnnnnnnnnnnnnnnnnnnnnnnnnnnnnnnnnnnnnnnnnnnnnnnnnnnnnnnnnnnnnnnnnnnnnnnnnnnnnnnnnnnnnnnnnnnnnnnnnnnnnnnnnnnnnnnnnnnnnnnnnnnnnnnnnnnnnnnnnnnnnnnnnnnnnnnnnnnnnnnnnnnnnnnnnnnnnnnnnnnnnnnnnnnnnnnnnnnnnnnnnnnnnnnnnnnnnnnnnnnnnnnnnnnnnnnnnnnnnnnnnnnnnnnnnnnnnnnnnnnnnnnnnnnnnnnnnnnnnnnnnnnnnnnnnnnnnnnnnnnnnnnnnnnnnnnnnnnnnnnnnnnnnnnnnnnnnnnnnnnnnnnnnnnnnnnnnnnnnnnnnnnnnnnnnnnnnnnnnnnnnnnnnnnnnnnnnnnnnnnnnnnnnnnnnnnnnnnnnnnnnnnnnnnnnnnnnnnnnnnnnnnnnnnnnnnnnnnnnnnnnnnnnnnnnnnnnnnnnnnnnnnnnnnnnnnnnnnnnnnnnnnnnnnnnnnnnnnnnnnnnnnnnnnnnnnnnnnnnnnnnnnnnnnnnnnnnnnnnnnnnnnnnnnnnnnnnnnnnnnnnnnnnnnnnnnnnnnnnnnnnnnnnnnnnnnnnnnnnnnnnnnnnnnnnnnnnnnnnnnnnnnnnnnnnnnnnnnnnnnnnnnnnnnnnnnnnnnnnnnnnnnnnnnnnnnnnnnnnnnnnnnnnnnnnnnnnnnnnnnnnnnnnnnnnnnnnnnnnnnnnnnnnnnnnnnnnnnnnnnnnnnnnnnnnnnnnnnnnnnnnnnnnnnnnnnnnnnnnnnnnnnnnnnnnnnnnnnnnnnnnnnnnnnnnnnnnnnnnnnnnnnnnnnnnnnnnnnnnnnnnnnnnnnnnnnnnnnnnnnnnnnnnnnnnnnnnnnnnnnnnnnnnnnnnnnnnnnnnnnnnnnnnnnnnnnnnnnnnnnnnnnnnnnnnnnnnnnnnnnnnnnnnnnnnnnnnnnnnnnnnnnnnnnnnnnnnnnnnnnnnnnnnnnnnnnnnnnnnnnnnnnnnnnnnnnnnnnnnnnnnnnnnnnnnnnnnnnnnnnnnnnnnnnnnnnnnnnnnnnnnnnnnnnnnnnnnnnnnnnnnnnnnnnnnnnnnnnnnnnnnnnnnnnnnnnnnnnnnnnnnnnnnnnnnnnnnnnnnnnnnnnnnnnnnnnnnnnnnnnnnnnnnnnnnnnnnnnnnnnnnnnnnnnnnnnnnnnnnnnnnnnnnnnnnnnnnnnnnnnnnnnnnnnnnnnnnnnnnnnnnnnnnnnnnnnnnnnnnnnnnnnnnnnnnnnnnnnnnnnnnnnnnnnnnnnnnnnnnnnnnnnnnnnnnnnnnnnnnnnnnnnnnnnnnnnnnnnnnnnnnnnnnnnnnnnnnnnnnnnnnnnnnnnnnnnnnnnnnnnnnnnnnnnnnnnnnnnnnnnnnnnnnnnnnnnnnnnnnnnnnnnnnnnnnnnnnnnnnnnnnnnnnnnnnnnnnnnnnnnnnnnnnnnnnnnnnnnnnnnnnnnnnnnnnnnnnnnnnnnnnnnnnnnnnnnnnnnnnnnnnnnnnnnnnnnnnnnnnnnnnnnnnnnnnnnnnnnnnnnnnnnnnnnnnnnnnnnnnnnnnnnnnnnnnnnnnnnnnnnnnnnnnnnnnnnnnnnnnnnnnnnnnnnnnnnnnnnnnnnnnnnnnnnnnnnnnnnnnnnnnnnnnnnnnnnnnnnnnnnnnnnnnnnnnnnnnnnnnnnnnnnnnnnnnnnnnnnnnnnnnnnnnnnnnnnnnnnnnnnnnnnnnnnnnnnnnnnnnnnnnnnnnnnnnnnnnnnnnnnnnnnnnnnnnnnnnnnnnnnnnnnnnnnnnnnnnnnnnnnnnnnnnnnnnnnnnnnnnnnnnnnnnnnnnnnnnnnnnnnnnnnnnnnnnnnnnnnnnnnnnnnnnnnnnnnnnnnnnnnnnnnnnnnnnnnnnnnnnnnnnnnnnnnnnnnnnnnnnnnnnnnnnnnnnnnnnnnnnnnnnnnnnnnnnnnnnnnnnnnnnnnnnnnnnnnnnnnnnnnnnnnnnnnnnnnnnnnnnnnnnnnnnnnnnnnnnnnnnnnnnnnnnnnnnnnnnnnnnnnnnnnnnnnnnnnnnnnnnnnnnnnnnnnnnnnnnnnnnnnnnnnnnnnnnnnnnnnnnnnnnnnnnnnnnnnnnnnnnnnnnnnnnnnnnnnnnnnnnnnnnnnnnnnnnnnnnnnnnnnnnnnnnnnnnnnnnnnnnnnnnnnnnnnnnnnnnnnnnnnnnnnnnnnnnnnnnnnnnnnnnnnnnnnnnnnnnnnnnnnnnnnnnnnnnnnnnnnnnnnnnnnnnnnnnnnnnnnnnnnnnnnnnnnnnnnnnnnnnnnnnnnnnnnnnnnnnnnnnnnnnnnnnnnnnnnnnnnnnnnnnnnnnnnnnnnnnnnnnnnnnnnnnnnnnnnnnnnnnnnnnnnnnnnnnnnnnnnnnnnnnnnnnnnnnnnnnnnnnnnnnnnnnnnnnnnnnnnnnnnnnnnnnnnnnnnnnnnnnnnnnnnnnnnnnnnnnnnnnnnnnnnnnnnnnnnnnnnnnnnnnnnnnnnnnnnnnnnnnnnnnnnnnnnnnnnnnnnnnnnnnnnnnnnnnnnnnnnnnnnnnnnnnnnnnnnnnnnnnnnnnnnnnnnnnnnnnnnnnnnnnnnnnnnnnnnnnnnnnnnnnnnnnnnnnnnnnnnnnnnnnnnnnnnnnnnnnnnnnnnnnnnnnnnnnnnnnnnnnnnnnnnnnnnnnnnnnnnnnnnnnnnnnnnnnnnnnnnnnnnnnnnnnnnnnnnnnnnnnnnnnnnnnnnnnnnnnnnnnnnnnnnnnnnnnnnnnnnnnnnnnnnnnnnnnnnnnnnnnnnnnnnnnnnnnnnnnnnnnnnnnnnnnnnnnnnnnnnnnnnnnnnnnnnnnnnnnnnnnnnnnnnnnnnnnnnnnnnnnnnnnnnnnnnnnnnnnnnnnnnnnnnnnnnnnnnnnnnnnnnnnnnnnnnnnnnnnnnnnnnnnnnnnnnnnnnnnnnnnnnnnnnnnnnnnnnnnnnnnnnnnnnnnnnnnnnnnnnnnnnnnnnnnnnnnnnnnnnnnnnnnnnnnnnnnnnnnnnnnnnnnnnnnnnnnnnnnnnnnnnnnnnnnnnnnnnnnnnnnnnnnnnnnnnnnnnnnnnnnnnnnnnnnnnnnnnnnnnnnnnnnnnnnnnnnnnnnnnnnnnnnnnnnnnnnnnnnnnnnnnnnnnnnnnnnnnnnnnnnnnnnnnnnnnnnnnnnnnnnnnnnnnnnnnnnnnnnnnnnnnnnnnnnnnnnnnnnnnnnnnnnnnnnnnnnnnnnnnnnnnnnnnnnnnnnnnnnnnnnnnnnnnnnnnnnnnnnnnnnnnnnnnnnnnnnnnnnnnnnnnnnnnnnnnnnnnnnnnnnnnnnnnnnnnnnnnnnnnnnnnnnnnnnnnnnnnnnnnnnnnnnnnnnnnnnnnnnnnnnnnnnnnnnnnnnnnnnnnnnnnnnnnnnnnnnnnnnnnnnnnnnnnnnnnnnnnnnnnnnnnnnnnnnnnnnnnnnnnnnnnnnnnnnnnnnnnnnnnnnnnnnnnnnnnnnnnnnnnnnnnnnnnnnnnnnnnnnnnnnnnnnnnnnnnnnnnnnnnnnnnnnnnnnnnnnnnnnnnnnnnnnnnnnnnnnnnnnnnnnnnnnnnnnnnnnnnnnnnnnnnnnnnnnnnnnnnnnnnnnnnnnnnnnnnnnnnnnnnnnnnnnnnnnnnnnnnnnnnnnnnnnnnnnnnnnnnnnnnnnnnnnnnnnnnnnnnnnnnnnnnnnnnnnnnnnnnnnnnnnnnnnnnnnnnnnnnnnnnnnnnnnnnnnnnnnnnnnnnnnnnnnnnnnnnnnnnnnnnnnnnnnnnnnnnnnnnnnnnnnnnnnnnnnnnnnnnnnnnnnnnnnnnnnnnnnnnnnnnnnnnnnnnnnnnnnnnnnnnnnnnnnnnnnnnnnnnnnnnnnnnnnnnnnnnnnnnnnnnnnnnnnnnnnnnnnnnnnnnnnnnnnnnnnnnnnnnnnnnnnnnnnnnnnnnnnnnnnnnnnnnnnnnnnnnnnnnnnnnnnnnnnnnnnnnnnnnnnnnnnnnnnnnnnnnnnnnnnnnnnnnnnnnnnnnnnnnnnnnnnnnnnnnnnnnnnnnnnnnnnnnnnnnnnnnnnnnnnnnnnnnnnnnnnnnnnnnnnnnnnnnnnnnnnnnnnnnnnnnnnnnnnnnnnnnnnnnnnnnnnnnnnnnnnnnnnnnnnnnnnnnnnnnnnnnnnnnnnnnnnnnnnnnnnnnnnnnnnnnnnnnnnnnnnnnnnnnnnnnnnnnnnnnnnnnnnnnnnnnnnnnnnnnnnnnnnnnnnnnnnnnnnnnnnnnnnnnnnnnnnnnnnnnnnnnnnnnnnnnnnnnnnnnnnnnnnnnnnnnnnnnnnnnnnnnnnnnnnnnnnnnnnnnnnnnnnnnnnnnnnnnnnnnnnnnnnnnnnnnnnnnnnnnnnnnnnnnnnnnnnnnnnnnnnnnnnnnnnnnnnnnnnnnnnnnnnnnnnnnnnnnnnnnnnnnnnnnnnnnnnnnnnnnnnnnnnnnnnnnnnnnnnnnnnnnnnnnnnnnnnnnnnnnnnnnnnnnnnnnnnnnnnnnnnnnnnnnnnnnnnnnnnnnnnnnnnnnnnnnnnnnnnnnnnnnnnnnnnnnnnnnnnnnnnnnnnnnnnnnnnnnnnnnnnnnnnnnnnnnnnnnnnnnnnnnnnnnnnnnnnnnnnnnnnnnnnnnnnnnnnnnnnnnnnnnnnnnnnnnnnnnnnnnnnnnnnnnnnnnnnnnnnnnnnnnnnnnnnnnnnnnnnnnnnnnnnnnnnnnnnnnnnnnnnnnnnnnnnnnnnnnnnnnnnnnnnnnnnnnnnnnnnnnnnnnnnnnnnnnnnnnnnnnnnnnnnnnnnnnnnnnnnnnnnnnnnnnnnnnnnnnnnnnnnnnnnnnnnnnnnnnnnnnnnnnnnnnnnnnnnnnnnnnnnnnnnnnnnnnnnnnnnnnnnnnnnnnnnnnnnnnnnnnnnnnnnnnnnnnnnnnnnnnnnnnnnnnnnnnnnnnnnnnnnnnnnnnnnnnnnnnnnnnnnnnnnnnnnnnnnnnnnnnnnnnnnnnnnnnnnnnnnnnnnnnnnnnnnnnnnnnnnnnnnnnnnnnnnnnnnnnnnnnnnnnnnnnnnnnnnnnnnnnnnnnnnnnnnnnnnnnnnnnnnnnnnnnnnnnnnnnnnnnnnnnnnnnnnnnnnnnnnnnnnnnnnnnnnnnnnnnnnnnnnnnnnnnnnnnnnnnnnnnnnnnnnnnnnnnnnnnnnnnnnnnnnnnnnnnnnnnnnnnnnnnnnnnnnnnnnnnnnnnnnnnnnnnnnnnnnnnnnnnnnnnnnnnnnnnnnnnnnnnnnnnnnnnnnnnnnnnnnnnnnnnnnnnnnnnnnnnnnnnnnnnnnnnnnnnnnnnnnnnnnnnnnnnnnnnnnnnnnnnnnnnnnnnnnnnnnnnnnnnnnnnnnnnnnnnnnnnnnnnnnnnnnnnnnnnnnnnnnnnnnnnnnnnnnnnnnnnnnnnnnnnnnnnnnnnnnnnnnnnnnnnnnnnnnnnnnnnnnnnnnnnnnnnnnnnnnnnnnnnnnnnnnnnnnnnnnnnnnnnnnnnnnnnnnnnnnnnnnnnnnnnnnnnnnnnnnnnnnnnnnnnnnnnnnnnnnnnnnnnnnnnnnnnnnnnnnnnnnnnnnnnnnnnnnnnnnnnnnnnnnnnnnnnnnnnnnnnnnnnnnnnnnnnnnnnnnnnnnnnnnnnnnnnnnnnnnnnnnnnnnnnnnnnnnnnnnnnnnnnnnnnnnnnnnnnnnnnnnnnnnnnnnnnnnnnnnnnnnnnnnnnnnnnnnnnnnnnnnnnnnnnnnnnnnnnnnnnnnnnnnnnnnnnnnnnnnnnnnnnnnnnnnnnnnnnnnnnnnnnnnnnnnnnnnnnnnnnnnnnnnnnnnnnnnnnnnnnnnnnnnnnnnnnnnnnnnnnnnnnnnnnnnnnnnnnnnnnnnnnnnnnnnnnnnnnnnnnnnnnnnnnnnnnnnnnnnnnnnnnnnnnnnnnnnnnnnnnnnnnnnnnnnnnnnnnnnnnnnnnnnnnnnnnnnnnnnnnnnnnnnnnnnnnnnnnnnnnnnnnnnnnnnnnnnnnnnnnnnnnnnnnnnnnnnnnnnnnnnnnnnnnnnnnnnnnnnnnnnnnnnnnnnnnnnnnnnnnnnnnnnnnnnnnnnnnnnnnnnnnnnnnnnnnnnnnnnnnnnnnnnnnnnnnnnnnnnnnnnnnnnnnnnnnnnnnnnnnnnnnnnnnnnnnnnnnnnnnnnnnnnnnnnnnnnnnnnnnnnnnnnnnnnnnnnnnnnnnnnnnnnnnnnnnnnnnnnnnnnnnnnnnnnnnnnnnnnnnnnnnnnnnnnnnnnnnnnnnnnnnnnnnnnnnnnnnnnnnnnnnnnnnnnnnnnnnnnnnnnnnnnnnnnnnnnnnnnnnnnnnnnnnnnnnnnnnnnnnnnnnnnnnnnnnnnnnnnnnnnnnnnnnnnnnnnnnnnnnnnnnnnnnnnnnnnnnnnnnnnnnnnnnnnnnnnnnnnnnnnnnnnnnnnnnnnnnnnnnnnnnnnnnnnnnnnnnnnnnnnnnnnnnnnnnnnnnnnnnnnnnnnnnnnnnnnnnnnnnnnnnnnnnnnnnnnnnnnnnnnnnnnnnnnnnnnnnnnnnnnnnnnnnnnnnnnnnnnnnnnnnnnnnnnnnnnnnnnnnnnnnnnnnnnnnnnnnnnnnnnnnnnnnnnnnnnnnnnnnnnnnnnnnnnnnnnnnnnnnnnnnnnnnnnnnnnnnnnnnnnnnnnnnnnnnnnnnnnnnnnnnnnnnnnnnnnnnnnnnnnnnnnnnnnnnnnnnnnnnnnnnnnnnnnnnnnnnnnnnnnnnnnnnnnnnnnnnnnnnnnnnnnnnnnnnnnnnnnnnnnnnnnnnnnnnnnnnnnnnnnnnnnnnnnnnnnnnnnnnnnnnnnnnnnnnnnnnnnnnnnnnnnnnnnnnnnnnnnnnnnnnnnnnnnnnnnnnnnnnnnnnnnnnnnnnnnnnnnnnnnnnnnnnnnnnnnnnnnnnnnnnnnnnnnnnnnnnnnnnnnnnnnnnnnnnnnnnnnnnnnnnnnnnnnnnnnnnnnnnnnnnnnnnnnnnnnnnnnnnnnnnnnnnnnnnnnnnnnnnnnnnnnnnnnnnnnnnnnnnnnnnnnnnnnnnnnnnnnnnnnnnnnnnnnnnnnnnnnnnnnnnnnnnnnnnnnnnnnnnnnnnnnnnnnnnnnnnnnnnnnnnnnnnnnnnnnnnnnnnnnnnnnnnnnnnnnnnnnnnnnnnnnnnnnnnnnnnnnnnnnnnnnnnnnnnnnnnnnnnnnnnnnnnnnnnnnnnnnnnnnnnnnnnnnnnnnnnnnnnnnnnnnnnnnnnnnnnnnnnnnnnnnnnnnnnnnnnnnnnnnnnnnnnnnnnnnnnnnnnnnnnnnnnnnnnnnnnnnnnnnnnnnnnnnnnnnnnnnnnnnnnnnnnnnnnnnnnnnnnnnnnnnnnnnnnnnnnnnnnnnnnnnnnnnnnnnnnnnnnnnnnnnnnnnnnnnnnnnnnnnnnnnnnnnnnnnnnnnnnnnnnnnnnnnnnnnnnnnnnnnnnnnnnnnnnnnnnnnnnnnnnnnnnnnnnnnnnnnnnnnnnnnnnnnnnnnnnnnnnnnnnnnnnnnnnnnnnnnnnnnnnnnnnnnnnnnnnnnnnnnnnnnnnnnnnnnnnnnnnnnnnnnnnnnnnnnnnnnnnnnnnnnnnnnnnnnnnnnnnnnnnnnnnnnnnnnnnnnnnnnnnnnnnnnnnnnnnnnnnnnnnnnnnnnnnnnnnnnnnnnnnnnnnnnnnnnnnnnnnnnnnnnnnnnnnnnnnnnnnnnnnnnnnnnnnnnnnnnnnnnnnnnnnnnnnnnnnnnnnnnnnnnnnnnnnnnnnnnnnnnnnnnnnnnnnnnnnnnnnnnnnnnnnnnnnnnnnnnnnnnnnnnnnnnnnnnnnnnnnnnnnnnnnnnnnnnnnnnnnnnnnnnnnnnnnnnnnnnnnnnnnnnnnnnnnnnnnnnnnnnnnnnnnnnnnnnnnnnnnnnnnnnnnnnnnnnnnnnnnnnnnnnnnnnnnnnnnnnnnnnnnnnnnnnnnnnnnnnnnnnnnnnnnnnnnnnnnnnnnnnnnnnnnnnnnnnnnnnnnnnnnnnnnnnnnnnnnnnnnnnnnnnnnnnnnnnnnnnnnnnnnnnnnnnnnnnnnnnnnnnnnnnnnnnnnnnnnnnnnnnnnnnnnnnnnnnnnnnnnnnnnnnnnnnnnnnnnnnnnnnnnnnnnnnnnnnnnnnnnnnnnnnnnnnnnnnnnnnnnnnnnnnnnnnnnnnnnnnnnnnnnnnnnnnnnnnnnnnnnnnnnnnnnnnnnnnnnnnnnnnnnnnnnnnnnnnnnnnnnnnnnnnnnnnnnnnnnnnnnnnnnnnnnnnnnnnnnnnnnnnnnnnnnnnnnnnnnnnnnnnnnnnnnnnnnnnnnnnnnnnnnnnnnnnnnnnnnnnnnnnnnnnnnnnnnnnnnnnnnnnnnnnnnnnnnnnnnnnnnnnnnnnnnnnnnnnnnnnnnnnnnnnnnnnnnnnnnnnnnnnnnnnnnnnnnnnnnnnnnnnnnnnnnnnnnnnnnnnnnnnnnnnnnnnnnnnnnnnnnnnnnnnnnnnnnnnnnnnnnnnnnnnnnnnnnnnnnnnnnnnnnnnnnnnnnnnnnnnnnnnnnnnnnnnnnnnnnnnnnnnnnnnnnnnnnnnnnnnnnnnnnnnnnnnnnnnnnnnnnnnnnnnnnnnnnnnnnnnnnnnnnnnnnnnnnnnnnnnnnnnnnnnnnnnnnnnnnnnnnnnnnnnnnnnnnnnnnnnnnnnnnnnnnnnnnnnnnnnnnnnnnnnnnnnnnnnnnnnnnnnnnnnnnnnnnnnnnnnnnnnnnnnnnnnnnnnnnnnnnnnnnnnnnnnnnnnnnnnnnnnnnnnnnnnnnnnnnnnnnnnnnnnnnnnnnnnnnnnnnnnnnnnnnnnnnnnnnnnnnnnnnnnnnnnnnnnnnnnnnnnnnnnnnnnnnnnnnnnnnnnnnnnnnnnnnnnnnnnnnnnnnnnnnnnnnnnnnnnnnnnnnnnnnnnnnnnnnnnnnnnnnnnnnnnnnnnnnnnnnnnnnnnnnnnnnnnnnnnnnnnnnnnnnnnnnnnnnnnnnnnnnnnnnnnnnnnnnnnnnnnnnnnnnnnnnnnnnnnnnnnnnnnnnnnnnnnnnnnnnnnnnnnnnnnnnnnnnnnnnnnnnnnnnnnnnnnnnnnnnnnnnnnnnnnnnnnnnnnnnnnnnnnnnnnnnnnnnnnnnnnnnnnnnnnnnnnnnnnnnnnnnnnnnnnnnnnnnnnnnnnnnnnnnnnnnnnnnnnnnnnnnnnnnnnnnnnnnnnnnnnnnnnnnnnnnnnnnnnnnnnnnnnnnnnnnnnnnnnnnnnnnnnnnnnnnnnnnnnnnnnnnnnnnnnnnnnnnnnnnnnnnnnnnnnnnnnnnnnnnnnnnnnnnnnnnnnnnnnnnnnnnnnnnnnnnnnnnnnnnnnnnnnnnnnnnnnnnnnnnnnnnnnnnnnnnnnnnnnnnnnnnnnnnnnnnnnnnnnnnnnnnnnnnnnnnnnnnnnnnnnnnnnnnnnnnnnnnnnnnnnnnnnnnnnnnnnnnnnnnnnnnnnnnnnnnnnnnnnnnnnnnnnnnnnnnnnnnnnnnnnnnnnnnnnnnnnnnnnnnnnnnnnnnnnnnnnnnnnnnnnnnnnnnnnnnnnnnnnnnnnnnnnnnnnnnnnnnnnnnnnnnnnnnnnnnnnnnnnnnnnnnnnnnnnnnnnnnnnnnnnnnnnnnnnnnnnnnnnnnnnnnnnnnnnnnnnnnnnnnnnnnnnnnnnnnnnnnnnnnnnnnnnnnnnnnnnnnnnnnnnnnnnnnnnnnnnnnnnnnnnnnnnnnnnnnnnnnnnnnnnnnnnnnnnnnnnnnnnnnnnnnnnnnnnnnnnnnnnnnnnnnnnnnnnnnnnnnnnnnnnnnnnnnnnnnnnnnnnnnnnnnnnnnnnnnnnnnnnnnnnnnnnnnnnnnnnnnnnnnnnnnnnnnnnnnnnnnnnnnnnnnnnnnnnnnnnnnnnnnnnnnnnnnnnnnnnnnnnnnnnnnnnnnnnnnnnnnnnnnnnnnnnnnnnnnnnnnnnnnnnnnnnnnnnnnnnnnnnnnnnnnnnnnnnnnnnnnnnnnnnnnnnnnnnnnnnnnnnnnnnnnnnnnnnnnnnnnnnnnnnnnnnnnnnnnnnnnnnnnnnnnnnnnnnnnnnnnnnnnnnnnnnnnnnnnnnnnnnnnnnnnnnnnnnnnnnnnnnnnnnnnnnnnnnnnnnnnnnnnnnnnnnnnnnnnnnnnnnnnnnnnnnnnnnnnnnnnnnnnnnnnnnnnnnnnnnnnnnnnnnnnnnnnnnnnnnnnnnnnnnnnnnnnnnnnnnnnnnnnnnnnnnnnnnnnnnnnnnnnnnnnnnnnnnnnnnnnnnnnnnnnnnnnnnnnnnnnnnnnnnnnnnnnnnnnnnnnnnnnnnnnnnnnnnnnnnnnnnnnnnnnnnnnnnnnnnnnnnnnnnnnnnnnnnnnnnnnnnnnnnnnnnnnnnnnnnnnnnnnnnnnnnnnnnnnnnnnnnnnnnnnnnnnnnnnnnnnnnnnnnnnnnnnnnnnnnnnnnnnnnnnnnnnnnnnnnnnnnnnnnnnnnnnnnnnnnnnnnnnnnnnnnnnnnnnnnnnnnnnnnnnnnnnnnnnnnnnnnnnnnnnnnnnnnnnnnnnnnnnnnnnnnnnnnnnnnnnnnnnnnnnnnnnnnnnnnnnnnnnnnnnnnnnnnnnnnnnnnnnnnnnnnnnnnnnnnnnnnnnnnnnnnnnnnnnnnnnnnnnnnnnnnnnnnnnnnnnnnnnnnnnnnnnnnnnnnnnnnnnnnnnnnnnnnnnnnnnnnnnnnnnnnnnnnnnnnnnnnnnnnnnnnnnnnnnnnnnnnnnnnnnnnnnnnnnnnnnnnnnnnnnnnnnnnnnnnnnnnnnnnnnnnnnnnnnnnnnnnnnnnnnnnnnnnnnnnnnnnnnnnnnnnnnnnnnnnnnnnnnnnnnnnnnnnnnnnnnnnnnnnnnnnnnnnnnnnnnnnnnnnnnnnnnnnnnnnnnnnnnnnnnnnnnnnnnnnnnnnnnnnnnnnnnnnnnnnnnnnnnnnnnnnnnnnnnnnnnnnnnnnnnnnnnnnnnnnnnnnnnnnnnnnnnnnnnnnnnnnnnnnnnnnnnnnnnnnnnnnnnnnnnnnnnnnnnnnnnnnnnnnnnnnnnnnnnnnnnnnnnnnnnnnnnnnnnnnnnnnnnnnnnnnnnnnnnnnnnnnnnnnnnnnnnnnnnnnnnnnnnnnnnnnnnnnnnnnnnnnnnnnnnnnnnnnnnnnnnnnnnnnnnnnnnnnnnnnnnnnnnnnnnnnnnnnnnnnnnnnnnnnnnnnnnnnnnnnnnnnnnnnnnnnnnnnnnnnnnnnnnnnnnnnnnnnnnnnnnnnnnnnnnnnnnnnnnnnnnnnnnnnnnnnnnnnnnnnnnnnnnnnnnnnnnnnnnnnnnnnnnnnnnnnnnnnnnnnnnnnnnnnnnnnnnnnnnnnnnnnnnnnnnnnnnnnnnnnnnnnnnnnnnnnnnnnnnnnnnnnnnnnnnnnnnnnnnnnnnnnnnnnnnnnnnnnnnnnnnnnnnnnnnnnnnnnnnnnnnnnnnnnnnnnnnnnnnnnnnnnnnnnnnnnnnnnnnnnnnnnnnnnnnnnnnnnnnnnnnnnnnnnnnnnnnnnnnnnnnnnnnnnnnnnnnnnnnnnnnnnnnnnnnnnnnnnnnnnnnnnnnnnnnnnnnnnnnnnnnnnnnnnnnnnnnnnnnnnnnnnnnnnnnnnnnnnnnnnnnnnnnnnnnnnnnnnnnnnnnnnnnnnnnnnnnnnnnnnnnnnnnnnnnnnnnnnnnnnnnnnnnnnnnnnnnnnnnnnnnnnnnnnnnnnnnnnnnnnnnnnnnnnnnnnnnnnnnnnnnnnnnnnnnnnnnnnnnnnnnnnnnnnnnnnnnnnnnnnnnnnnnnnnnnnnnnnnnnnnnnnnnnnnnnnnnnnnnnnnnnnnnnnnnnnnnnnnnnnnnnnnnnnnnnnnnnnnnnnnnnnnnnnnnnnnnnnnnnnnnnnnnnnnnnnnnnnnnnnnnnnnnnnnnnnnnnnnnnnnnnnnnnnnnnnnnnnnnnnnnnnnnnnnnnnnnnnnnnnnnnnnnnnnnnnnnnnnnnnnnnnnnnnnnnnnnnnnnnnnnnnnnnnnnnnnnnnnnnnnnnnnnnnnnnnnnnnnnnnnnnnnnnnnnnnnnnnnnnnnnnnnnnnnnnnnnnnnnnnnnnnnnnnnnnnnnnnnnnnnnnnnnnnnnnnnnnnnnnnnnnnnnnnnnnnnnnnnnnnnnnnnnnnnnnnnnnnnnnnnnnnnnnnnnnnnnnnnnnnnnnnnnnnnnnnnnnnnnnnnnnnnnnnnnnnnnnnnnnnnnnnnnnnnnnnnnnnnnnnnnnnnnnnnnnnnnnnnnnnnnnnnnnnnnnnnnnnnnnnnnnnnnnnnnnnnnnnnnnnnnnnnnnnnnnnnnnnnnnnnnnnnnnnnnnnnnnnnnnnnnnnnnnnnnnnnnnnnnnnnnnnnnnnnnnnnnnnnnnnnnnnnnnnnnnnnnnnnnnnnnnnnnnnnnnnnnnnnnnnnnnnnnnnnnnnnnnnnnnnnnnnnnnnnnnnnnnnnnnnnnnnnnnnnnnnnnnnnnnnnnnnnnnnnnnnnnnnnnnnnnnnnnnnnnnnnnnnnnnnnnnnnnnnnnnnnnnnnnnnnnnnnnnnnnnnnnnnnnnnnnnnnnnnnnnnnnnnnnnnnnnnnnnnnnnnnnnnnnnnnnnnnnnnnnnnnnnnnnnnnnnnnnnnnnnnnnnnnnnnnnnnnnnnnnnnnnnnnnnnnnnnnnnnnnnnnnnnnnnnnnnnnnnnnnnnnnnnnnnnnnnnnnnnnnnnnnnnnnnnnnnnnnnnnnnnnnnnnnnnnnnnnnnnnnnnnnnnnnnnnnnnnnnnnnnnnnnnnnnnnnnnnnnnnnnnnnnnnnnnnnnnnnnnnnnnnnnnnnnnnnnnnnnnnnnnnnnnnnnnnnnnnnnnnnnnnnnnnnnnnnnnnnnnnnnnnnnnnnnnnnnnnnnnnnnnnnnnnnnnnnnnnnnnnnnnnnnnnnnnnnnnnnnnnnnnnnnnnnnnnnnnnnnnnnnnnnnnnnnnnnnnnnnnnnnnnnnnnnnnnnnnnnnnnnnnnnnnnnnnnnnnnnnnnnnnnnnnnnnnnnnnnnnnnnnnnnnnnnnnnnnnnnnnnnnnnnnnnnnnnnnnnnnnnnnnnnnnnnnnnnnnnnnnnnnnnnnnnnnnnnnnnnnnnnnnnnnnnnnnnnnnnnnnnnnnnnnnnnnnnnnnnnnnnnnnnnnnnnnnnnnnnnnnnnnnnnnnnnnnnnnnnnnnnnnnnnnnnnnnnnnnnnnnnnnnnnnnnnnnnnnnnnnnnnnnnnnnnnnnnnnnnnnnnnnnnnnnnnnnnnnnnnnnnnnnnnnnnnnnnnnnnnnnnnnnnnnnnnnnnnnnnnnnnnnnnnnnnnnnnnnnnnnnnnnnnnnnnnnnnnnnnnnnnnnnnnnnnnnnnnnnnnnnnnnnnnnnnnnnnnnnnnnnnnnnnnnnnnnnnnnnnnnnnnnnnnnnnnnnnnnnnnnnnnnnnnnnnnnnnnnnnnnnnnnnnnnnnnnnnnnnnnnnnnnnnnnnnnnnnnnnnnnnnnnnnnnnnnnnnnnnnnnnnnnnnnnnnnnnnnnnnnnnnnnnnnnnnnnnnnnnnnnnnnnnnnnnnnnnnnnnnnnnnnnnnnnnnnnnnnnnnnnnnnnnnnnnnnnnnnnnnnnnnnnnnnnnnnnnnnnnnnnnnnnnnnnnnnnnnnnnnnnnnnnnnnnnnnnnnnnnnnnnnnnnnnnnnnnnnnnnnnnnnnnnnnnnnnnnnnnnnnnnnnnnnnnnnnnnnnnnnnnnnnnnnnnnnnnnnnnnnnnnnnnnnnnnnnnnnnnnnnnnnnnnnnnnnnnnnnnnnnnnnnnnnnnnnnnnnnnnnnnnnnnnnnnnnnnnnnnnnnnnnnnnnnnnnnnnnnnnnnnnnnnnnnnnnnnnnnnnnnnnnnnnnnnnnnnnnnnnnnnnnnnnnnnnnnnnnnnnnnnnnnnnnnnnnnnnnnnnnnnnnnnnnnnnnnnnnnnnnnnnnnnnnnnnnnnnnnnnnnnnnnnnnnnnnnnnnnnnnnnnnnnnnnnnnnnnnnnnnnnnnnnnnnnnnnnnnnnnnnnnnnnnnnnnnnnnnnnnnnnnnnnnnnnnnnnnnnnnnnnnnnnnnnnnnnnnnnnnnnnnnnnnnnnnnnnnnnnnnnnnnnnnnnnnnnnnnnnnnnnnnnnnnnnnnnnnnnnnnnnnnnnnnnnnnnnnnnnnnnnnnnnnnnnnnnnnnnnnnnnnnnnnnnnnnnnnnnnnnnnnnnnnnnnnnnnnnnnnnnnnnnnnnnnnnnnnnnnnnnnnnnnnnnnnnnnnnnnnnnnnnnnnnnnnnnnnnnnnnnnnnnnnnnnnnnnnnnnnnnnnnnnnnnnnnnnnnnnnnnnnnnnnnnnnnnnnnnnnnnnnnnnnnnnnnnnnnnnnnnnnnnnnnnnnnnnnnnnnnnnnnnnnnnnnnnnnnnnnnnnnnnnnnnnnnnnnnnnnnnnnnnnnnnnnnnnnnnnnnnnnnnnnnnnnnnnnnnnnnnnnnnnnnnnnnnnnnnnnnnnnnnnnnnnnnnnnnnnnnnnnnnnnnnnnnnnnnnnnnnnnnnnnnnnnnnnnnnnnnnnnnnnnnnnnnnnnnnnnnnnnnnnnnnnnnnnnnnnnnnnnnnnnnnnnnnnnnnnnnnnnnnnnnnnnnnnnnnnnnnnnnnnnnnnnnnnnnnnnnnnnnnnnnnnnnnnnnnnnnnnnnnnnnnnnnnnnnnnnnnnnnnnnnnnnnnnnnnnnnnnnnnnnnnnnnnnnnnnnnnnnnnnnnnnnnnnnnnnnnnnnnnnnnnnnnnnnnnnnnnnnnnnnnnnnnnnnnnnnnnnnnnnnnnnnnnnnnnnnnnnnnnnnnnnnnnnnnnnnnnnnnnnnnnnnnnnnnnnnnnnnnnnnnnnnnnnnnnnnnnnnnnnnnnnnnnnnnnnnnnnnnnnnnnnnnnnnnnnnnnnnnnnnnnnnnnnnnnnnnnnnnnnnnnnnnnnnnnnnnnnnnnnnnnnnnnnnnnnnnnnnnnnnnnnnnnnnnnnnnnnnnnnnnnnnnnnnnnnnnnnnnnnnnnnnnnnnnnnnnnnnnnnnnnnnnnnnnnnnnnnnnnnnnnnnnnnnnnnnnnnnnnnnnnnnnnnnnnnnnnnnnnnnnnnnnnnnnnnnnnnnnnnnnnnnnnnnnnnnnnnnnnnnnnnnnnnnnnnnnnnnnnnnnnnnnnnnnnnnnnnnnnnnnnnnnnnnnnnnnnnnnnnnnnnnnnnnnnnnnnnnnnnnnnnnnnnnnnnnnnnnnnnnnnnnnnnnnnnnnnnnnnnnnnnnnnnnnnnnnnnnnnnnnnnnnnnnnnnnnnnnnnnnnnnnnnnnnnnnnnnnnnnnnnnnnnnnnnnnnnnnnnnnnnnnnnnnnnnnnnnnnnnnnnnnnnnnnnnnnnnnnnnnnnnnnnnnnnnnnnnnnnnnnnnnnnnnnnnnnnnnnnnnnnnnnnnnnnnnnnnnnnnnnnnnnnnnnnnnnnnnnnnnnnnnnnnnnnnnnnnnnnnnnnnnnnnnnnnnnnnnnnnnnnnnnnnnnnnnnnnnnnnnnnnnnnnnnnnnnnnnnnnnnnnnnnnnnnnnnnnnnnnnnnnnnnnnnnnnnnnnnnnnnnnnnnnnnnnnnnnnnnnnnnnnnnnnnnnnnnnnnnnnnnnnnnnnnnnnnnnnnnnnnnnnnnnnnnnnnnnnnnnnnnnnnnnnnnnnnnnnnnnnnnnnnnnnnnnnnnnnnnnnnnnnnnnnnnnnnnnnnnnnnnnnnnnnnnnnnnnnnnnnnnnnnnnnnnnnnnnnnnnnnnnnnnnnnnnnnnnnnnnnnnnnnnnnnnnnnnnnnnnnnnnnnnnnnnnnnnnnnnnnnnnnnnnnnnnnnnnnnnnnnnnnnnnnnnnnnnnnnnnnnnnnnnnnnnnnnnnnnnnnnnnnnnnnnnnnnnnnnnnnnnnnnnnnnnnnnnnnnnnnnnnnnnnnnnnnnnnnnnnnnnnnnnnnnnnnnnnnnnnnnnnnnnnnnnnnnnnnnnnnnnnnnnnnnnnnnnnnnnnnnnnnnnnnnnnnnnnnnnnnnnnnnnnnnnnnnnnnnnnnnnnnnnnnnnnnnnnnnnnnnnnnnnnnnnnnnnnnnnnnnnnnnnnnnnnnnnnnnnnnnnnnnnnnnnnnnnnnnnnnnnnnnnnnnnnnnnnnnnnnnnnnnnnnnnnnnnnnnnnnnnnnnnnnnnnnnnnnnnnnnnnnnnnnnnnnnnnnnnnnnnnnnnnnnnnnnnnnnnnnnnnnnnnnnnnnnnnnnnnnnnnnnnnnnnnnnnnnnnnnnnnnnnnnnnnnnnnnnnnnnnnnnnnnnnnnnnnnnnnnnnnnnnnnnnnnnnnnnnnnnnnnnnnnnnnnnnnnnnnnnnnnnnnnnnnnnnnnnnnnnnnnnnnnnnnnnnnnnnnnnnnnnnnnnnnnnnnnnnnnnnnnnnnnnnnnnnnnnnnnnnnnnnnnnnnnnnnnnnnnnnnnnnnnnnnnnnnnnnnnnnnnnnnnnnnnnnnnnnnnnnnnnnnnnnnnnnnnnnnnnnnnnnnnnnnnnnnnnnnnnnnnnnnnnnnnnnnnnnnnnnnnnnnnnnnnnnnnnnnnnnnnnnnnnnnnnnnnnnnnnnnnnnnnnnnnnnnnnnnnnnnnnnnnnnnnnnnnnnnnnnnnnnnnnnnnnnnnnnnnnnnnnnnnnnnnnnnnnnnnnnnnnnnnnnnnnnnnnnnnnnnnnnnnnnnnnnnnnnnnnnnnnnnnnnnnnnnnnnnnnnnnnnnnnnnnnnnnnnnnnnnnnnnnnnnnnnnnnnnnnnnnnnnnnnnnnnnnnnnnnnnnnnnnnnnnnnnnnnnnnnnnnnnnnnnnnnnnnnnnnnnnnnnnnnnnnnnnnnnnnnnnnnnnnnnnnnnnnnnnnnnnnnnnnnnnnnnnnnnnnnnnnnnnnnnnnnnnnnnnnnnnnnnnnnnnnnnnnnnnnnnnnnnnnnnnnnnnnnnnnnnnnnnnnnnnnnnnnnnnnnnnnnnnnnnnnnnnnnnnnnnnnnnnnnnnnnnnnnnnnnnnnnnnnnnnnnnnnnnnnnnnnnnnnnnnnnnnnnnnnnnnnnnnnnnnnnnnnnnnnnnnnnnnnnnnnnnnnnnnnnnnnnnnnnnnnnnnnnnnnnnnnnnnnnnnnnnnnnnnnnnnnnnnnnnnnnnnnnnnnnnnnnnnnnnnnnnnnnnnnnnnnnnnnnnnnnnnnnnnnnnnnnnnnnnnnnnnnnnnnnnnnnnnnnnnnnnnnnnnnnnnnnnnnnnnnnnnnnnnnnnnnnnnnnnnnnnnnnnnnnnnnnnnnnnnnnnnnnnnnnnnnnnnnnnnnnnnnnnnnnnnnnnnnnnnnnnnnnnnnnnnnnnnnnnnnnnnnnnnnnnnnnnnnnnnnnnnnnnnnnnnnnnnnnnnnnnnnnnnnnnnnnnnnnnnnnnnnnnnnnnnnnnnnnnnnnnnnnnnnnnnnnnnnnnnnnnnnnnnnnnnnnnnnnnnnnnnnnnnnnnnnnnnnnnnnnnnnnnnnnnnnnnnnnnnnnnnnnnnnnnnnnnnnnnnnnnnnnnnnnnnnnnnnnnnnnnnnnnnnnnnnnnnnnnnnnnnnnnnnnnnnnnnnnnnnnnnnnnnnnnnnnnnnnnnnnnnnnnnnnnnnnnnnnnnnnnnnnnnnnnnnnnnnnnnnnnnnnnnnnnnnnnnnnnnnnnnnnnnnnnnnnnnnnnnnnnnnnnnnnnnnnnnnnnnnnnnnnnnnnnnnnnnnnnnnnnnnnnnnnnnnnnnnnnnnnnnnnnnnnnnnnnnnnnnnnnnnnnnnnnnnnnnnnnnnnnnnnnnnnnnnnnnnnnnnnnnnnnnnnnnnnnnnnnnnnnnnnnnnnnnnnnnnnnnnnnnnnnnnnnnnnnnnnnnnnnnnnnnnnnnnnnnnnnnnnnnnnnnnnnnnnnnnnnnnnnnnnnnnnnnnnnnnnnnnnnnnnnnnnnnnnnnnnnnnnnnnnnnnnnnnnnnnnnnnnnnnnnnnnnnnnnnnnnnnnnnnnnnnnnnnnnnnnnnnnnnnnnnnnnnnnnnnnnnnnnnnnnnnnnnnnnnnnnnnnnnnnnnnnnnnnnnnnnnnnnnnnnnnnnnnnnnnnnnnnnnnnnnnnnnnnnnnnnnnnnnnnnnnnnnnnnnnnnnnnnnnnnnnnnnnnnnnnnnnnnnnnnnnnnnnnnnnnnnnnnnnnnnnnnnnnnnnnnnnnnnnnnnnnnnnnnnnnnnnnnnnnnnnnnnnnnnnnnnnnnnnnnnnnnnnnnnnnnnnnnnnnnnnnnnnnnnnnnnnnnnnnnnnnnnnnnnnnnnnnnnnnnnnnnnnnnnnnnnnnnnnnnnnnnnnnnnnnnnnnnnnnnnnnnnnnnnnnnnnnnnnnnnnnnnnnnnnnnnnnnnnnnnnnnnnnnnnnnnnnnnnnnnnnnnnnnnnnnnnnnnnnnnnnnnnnnnnnnnnnnnnnnnnnnnnnnnnnnnnnnnnnnnnnnnnnnnnnnnnnnnnnnnnnnnnnnnnnnnnnnnnnnnnnnnnnnnnnnnnnnnnnnnnnnnnnnnnnnnnnnnnnnnnnnnnnnnnnnnnnnnnnnnnnnnnnnnnnnnnnnnnnnnnnnnnnnnnnnnnnnnnnnnnnnnnnnnnnnnnnnnnnnnnnnnnnnnnnnnnnnnnnnnnnnnnnnnnnnnnnnnnnnnnnnnnnnnnnnnnnnnnnnnnnnnnnnnnnnnnnnnnnnnnnnnnnnnnnnnnnnnnnnnnnnnnnnnnnnnnnnnnnnnnnnnnnnnnnnnnnnnnnnnnnnnnnnnnnnnnnnnnnnnnnnnnnnnnnnnnnnnnnnnnnnnnnnnnnnnnnnnnnnnnnnnnnnnnnnnnnnnnnnnnnnnnnnnnnnnnnnnnnnnnnnnnnnnnnnnnnnnnnnnnnnnnnnnnnnnnnnnnnnnnnnnnnnnnnnnnnnnnnnnnnnnnnnnnnnnnnnnnnnnnnnnnnnnnnnnnnnnnnnnnnnnnnnnnnnnnnnnnnnnnnnnnnnnnnnnnnnnnnnnnnnnnnnnnnnnnnnnnnnnnnnnnnnnnnnnnnnnnnnnnnnnnnnnnnnnnnnnnnnnnnnnnnnnnnnnnnnnnnnnnnnnnnnnnnnnnnnnnnnnnnnnnnnnnnnnnnnnnnnnnnnnnnnnnnnnnnnnnnnnnnnnnnnnnnnnnnnnnnnnnnnnnnnnnnnnnnnnnnnnnnnnnnnnnnnnnnnnnnnnnnnnnnnnnnnnnnnnnnnnnnnnnnnnnnnnnnnnnnnnnnnnnnnnnnnnnnnnnnnnnnnnnnnnnnnnnnnnnnnnnnnnnnnnnnnnnnnnnnnnnnnnnnnnnnnnnnnnnnnnnnnnnnnnnnnnnnnnnnnnnnnnnnnnnnnnnnnnnnnnnnnnnnnnnnnnnnnnnnnnnnnnnnnnnnnnnnnnnnnnnnnnnnnnnnnnnnnnnnnnnnnnnnnnnnnnnnnnnnnnnnnnnnnnnnnnnnnnnnnnnnnnnnnnnnnnnnnnnnnnnnnnnnnnnnnnnnnnnnnnnnnnnnnnnnnnnnnnnnnnnnnnnnnnnnnnnnnnnnnnnnnnnnnnnnnnnnnnnnnnnnnnnnnnnnnnnnnnnnnnnnnnnnnnnnnnnnnnnnnnnnnnnnnnnnnnnnnnnnnnnnnnnnnnnnnnnnnnnnnnnnnnnnnnnnnnnnnnnnnnnnnnnnnnnnnnnnnnnnnnnnnnnnnnnnnnnnnnnnnnnnnnnnnnnnnnnnnnnnnnnnnnnnnnnnnnnnnnnnnnnnnnnnnnnnnnnnnnnnnnnnnnnnnnnnnnnnnnnnnnnnnnnnnnnnnnnnnnnnnnnnnnnnnnnnnnnnnnnnnnnnnnnnnnnnnnnnnnnnnnnnnnnnnnnnnnnnnnnnnnnnnnnnnnnnnnnnnnnnnnnnnnnnnnnnnnnnnnnnnnnnnnnnnnnnnnnnnnnnnnnnnnnnnnnnnnnnnnnnnnnnnnnnnnnnnnnnnnnnnnnnnnnnnnnnnnnnnnnnnnnnnnnnnnnnnnnnnnnnnnnnnnnnnnnnnnnnnnnnnnnnnnnnnnnnnnnnnnnnnnnnnnnnnnnnnnnnnnnnnnnnnnnnnnnnnnnnnnnnnnnnnnnnnnnnnnnnnnnnnnnnnnnnnnnnnnnnnnnnnnnnnnnnnnnnnnnnnnnnnnnnnnnnnnnnnnnnnnnnnnnnnnnnnnnnnnnnnnnnnnnnnnnnnnnnnnnnnnnnnnnnnnnnnnnnnnnnnnnnnnnnnnnnnnnnnnnnnnnnnnnnnnnnnnnnnnnnnnnnnnnnnnnnnnnnnnnnnnnnnnnnnnnnnnnnnnnnnnnnnnnnnnnnnnnnnnnnnnnnnnnnnnnnnnnnnnnnnnnnnnnnnnnnnnnnnnnnnnnnnnnnnnnnnnnnnnnnnnnnnnnnnnnnnnnnnnnnnnnnnnnnnnnnnnnnnnnnnnnnnnnnnnnnnnnnnnnnnnnnnnnnnnnnnnnnnnnnnnnnnnnnnnnnnnnnnnnnnnnnnnnnnnnnnnnnnnnnnnnnnnnnnnnnnnnnnnnnnnnnnnnnnnnnnnnnnnnnnnnnnnnnnnnnnnnnnnnnnnnnnnnnnnnnnnnnnnnnnnnnnnnnnnnnnnnnnnnnnnnnnnnnnnnnnnnnnnnnnnnnnnnnnnnnnnnnnnnnnnnnnnnnnnnnnnnnnnnnnnnnnnnnnnnnnnnnnnnnnnnnnnnnnnnnnnnnnnnnnnnnnnnnnnnnnnnnnnnnnnnnnnnnnnnnnnnnnnnnnnnnnnnnnnnnnnnnnnnnnnnnnnnnnnnnnnnnnnnnnnnnnnnnnnnnnnnnnnnnnnnnnnnnnnnnnnnnnnnnnnnnnnnnnnnnnnnnnnnnnnnnnnnnnnnnnnnnnnnnnnnnnnnnnnnnnnnnnnnnnnnnnnnnnnnnnnnnnnnnnnnnnnnnnnnnnnnnnnnnnnnnnnnnnnnnnnnnnnnnnnnnnnnnnnnnnnnnnnnnnnnnnnnnnnnnnnnnnnnnnnnnnnnnnnnnnnnnnnnnnnnnnnnnnnnnnnnnnnnnnnnnnnnnnnnnnnnnnnnnnnnnnnnnnnnnnnnnnnnnnnnnnnnnnnnnnnnnnnnnnnnnnnnnnnnnnnnnnnnnnnnnnnnnnnnnnnnnnnnnnnnnnnnnnnnnnnnnnnnnnnnnnnnnnnnnnnnnnnnnnnnnnnnnnnnnnnnnnnnnnnnnnnnnnnnnnnnnnnnnnnnnnnnnnnnnnnnnnnnnnnnnnnnnnnnnnnnnnnnnnnnnnnnnnnnnnnnnnnnnnnnnnnnnnnnnnnnnnnnnnnnnnnnnnnnnnnnnnnnnnnnnnnnnnnnnnnnnnnnnnnnnnnnnnnnnnnnnnnnnnnnnnnnnnnnnnnnnnnnnnnnnnnnnnnnnnnnnnnnnnnnnnnnnnnnnnnnnnnnnnnnnnnnnnnnnnnnnnnnnnnnnnnnnnnnnnnnnnnnnnnnnnnnnnnnnnnnnnnnnnnnnnnnnnnnnnnnnnnnnnnnnnnnnnnnnnnnnnnnnnnnnnnnnnnnnnnnnnnnnnnnnnnnnnnnnnnnnnnnnnnnnnnnnnnnnnnnnnnnnnnnnnnnnnnnnnnnnnnnnnnnnnnnnnnnnnnnnnnnnnnnnnnnnnnnnnnnnnnnnnnnnnnnnnnnnnnnnnnnnnnnnnnnnnnnnnnnnnnnnnnnnnnnnnnnnnnnnnnnnnnnnnnnnnnnnnnnnnnnnnnnnnnnnnnnnnnnnnnnnnnnnnnnnnnnnnnnnnnnnnnnnnnnnnnnnnnnnnnnnnnnnnnnnnnnnnnnnnnnnnnnnnnnnnnnnnnnnnnnnnnnnnnnnnnnnnnnnnnnnnnnnnnnnnnnnnnnnnnnnnnnnnnnnnnnnnnnnnnnnnnnnnnnnnnnnnnnnnnnnnnnnnnnnnnnnnnnnnnnnnnnnnnnnnnnnnnnnnnnnnnnnnnnnnnnnnnnnnnnnnnnnnnnnnnnnnnnnnnnnnnnnnnnnnnnnnnnnnnnnnnnnnnnnnnnnnnnnnnnnnnnnnnnnnnnnnnnnnnnnnnnnnnnnnnnnnnnnnnnnnnnnnnnnnnnnnnnnnnnnnnnnnnnnnnnnnnnnnnnnnnnnnnnnnnnnnnnnnnnnnnnnnnnnnnnnnnnnnnnnnnnnnnnnnnnnnnnnnnnnnnnnnnnnnnnnnnnnnnnnnnnnnnnnnnnnnnnnnnnnnnnnnnnnnnnnnnnnnnnnnnnnnnnnnnnnnnnnnnnnnnnnnnnnnnnnnnnnnnnnnnnnnnnnnnnnnnnnnnnnnnnnnnnnnnnnnnnnnnnnnnnnnnnnnnnnnnnnnnnnnnnnnnnnnnnnnnnnnnnnnnnnnnnnnnnnnnnnnnnnnnnnnnnnnnnnnnnnnnnnnnnnnnnnnnnnnnnnnnnnnnnnnnnnnnnnnnnnnnnnnnnnnnnnnnnnnnnnnnnnnnnnnnnnnnnnnnnnnnnnnnnnnnnnnnnnnnnnnnnnnnnnnnnnnnnnnnnnnnnnnnnnnnnnnnnnnnnnnnnnnnnnnnnnnnnnnnnnnnnnnnnnnnnnnnnnnnnnnnnnnnnnnnnnnnnnnnnnnnnnnnnnnnnnnnnnnnnnnnnnnnnnnnnnnnnnnnnnnnnnnnnnnnnnnnnnnnnnnnnnnnnnnnnnnnnnnnnnnnnnnnnnnnnnnnnnnnnnnnnnnnnnnnnnnnnnnnnnnnnnnnnnnnnnnnnnnnnnnnnnnnnnnnnnnnnnnnnnnnnnnnnnnnnnnnnnnnnnnnnnnnnnnnnnnnnnnnnnnnnnnnnnnnnnnnnnnnnnnnnnnnnnnnnnnnnnnnnnnnnnnnnnnnnnnnnnnnnnnnnnnnnnnnnnnnnnnnnnnnnnnnnnnnnnnnnnnnnnnnnnnnnnnnnnnnnnnnnnnnnnnnnnnnnnnnnnnnnnnnnnnnnnnnnnnnnnnnnnnnnnnnnnnnnnnnnnnnnnnnnnnnnnnnnnnnnnnnnnnnnnnnnnnnnnnnnnnnnnnnnnnnnnnnnnnnnnnnnnnnnnnnnnnnnnnnnnnnnnnnnnnnnnnnnnnnnnnnnnnnnnnnnnnnnnnnnnnnnnnnnnnnnnnnnnnnnnnnnnnnnnnnnnnnnnnnnnnnnnnnnnnnnnnnnnnnnnnnnnnnnnnnnnnnnnnnnnnnnnnnnnnnnnnnnnnnnnnnnnnnnnnnnnnnnnnnnnnnnnnnnnnnnnnnnnnnnnnnnnnnnnnnnnnnnnnnnnnnnnnnnnnnnnnnnnnnnnnnnnnnnnnnnnnnnnnnnnnnnnnnnnnnnnnnnnnnnnnnnnnnnnnnnnnnnnnnnnnnnnnnnnnnnnnnnnnnnnnnnnnnnnnnnnnnnnnnnnnnnnnnnnnnnnnnnnnnnnnnnnnnnnnnnnnnnnnnnnnnnnnnnnnnnnnnnnnnnnnnnnnnnnnnnnnnnnnnnnnnnnnnnnnnnnnnnnnnnnnnnnnnnnnnnnnnnnnnnnnnnnnnnnnnnnnnnnnnnnnnnnnnnnnnnnnnnnnnnnnnnnnnnnnnnnnnnnnnnnnnnnnnnnnnnnnnnnnnnnnnnnnnnnnnnnnnnnnnnnnnnnnnnnnnnnnnnnnnnnnnnnnnnnnnnnnnnnnnnnnnnnnnnnnnnnnnnnnnnnnnnnnnnnnnnnnnnnnnnnnnnnnnnnnnnnnnnnnnnnnnnnnnnnnnnnnnnnnnnnnnnnnnnnnnnnnnnnnnnnnnnnnnnnnnnnnnnnnnnnnnnnnnnnnnnnnnnnnnnnnnnnnnnnnnnnnnnnnnnnnnnnnnnnnnnnnnnnnnnnnnnnnnnnnnnnnnnnnnnnnnnnnnnnnnnnnnnnnnnnnnnnnnnnnnnnnnnnnnnnnnnnnnnnnnnnnnnnnnnnnnnnnnnnnnnnnnnnnnnnnnnnnnnnnnnnnnnnnnnnnnnnnnnnnnnnnnnnnnnnnnnnnnnnnnnnnnnnnnnnnnnnnnnnnnnnnnnnnnnnnnnnnnnnnnnnnnnnnnnnnnnnnnnnnnnnnnnnnnnnnnnnnnnnnnnnnnnnnnnnnnnnnnnnnnnnnnnnnnnnnnnnnnnnnnnnnnnnnnnnnnnnnnnnnnnnnnnnnnnnnnnnnnnnnnnnnnnnnnnnnnnnnnnnnnnnnnnnnnnnnnnnnnnnnnnnnnnnnnnnnnnnnnnnnnnnnnnnnnnnnnnnnnnnnnnnnnnnnnnnnnnnnnnnnnnnnnnnnnnnnnnnnnnnnnnnnnnnnnnnnnnnnnnnnnnnnnnnnnnnnnnnnnnnnnnnnnnnnnnnnnnnnnnnnnnnnnnnnnnnnnnnnnnnnnnnnnnnnnnnnnnnnnnnnnnnnnnnnnnnnnnnnnnnnnnnnnnnnnnnnnnnnnnnnnnnnnnnnnnnnnnnnnnnnnnnnnnnnnnnnnnnnnnnnnnnnnnnnnnnnnnnnnnnnnnnnnnnnnnnnnnnnnnnnnnnnnnnnnnnnnnnnnnnnnnnnnnnnnnnnnnnnnnnnnnnnnnnnnnnnnnnnnnnnnnnnnnnnnnnnnnnnnnnnnnnnnnnnnnnnnnnnnnnnnnnnnnnnnnnnnnnnnnnnnnnnnnnnnnnnnnnnnnnnnnnnnnnnnnnnnnnnnnnnnnnnnnnnnnnnnnnnnnnnnnnnnnnnnnnnnnnnnnnnnnnnnnnnnnnnnnnnnnnnnnnnnnnnnnnnnnnnnnnnnnnnnnnnnnnnnnnnnnnnnnnnnnnnnnnnnnnnnnnnnnnnnnnnnnnnnnnnnnnnnnnnnnnnnnnnnnnnnnnnnnnnnnnnnnnnnnnnnnnnnnnnnnnnnnnnnnnnnnnnnnnnnnnnnnnnnnnnnnnnnnnnnnnnnnnnnnnnnnnnnnnnnnnnnnnnnnnnnnnnnnnnnnnnnnnnnnnnnnnnnnnnnnnnnnnnnnnnnnnnnnnnnnnnnnnnnnnnnnnnnnnnnnnnnnnnnnnnnnnnnnnnnnnnnnnnnnnnnnnnnnnnnnnnnnnnnnnnnnnnnnnnnnnnnnnnnnnnnnnnnnnnnnnnnnnnnnnnnnnnnnnnnnnnnnnnnnnnnnnnnnnnnnnnnnnnnnnnnnnnnnnnnnnnnnnnnnnnnnnnnnnnnnnnnnnnnnnnnnnnnnnnnnnnnnnnnnnnnnnnnnnnnnnnnnnnnnnnnnnnnnnnnnnnnnnnnnnnnnnnnnnnnnnnnnnnnnnnnnnnnnnnnnnnnnnnnnnnnnnnnnnnnnnnnnnnnnnnnnnnnnnnnnnnnnnnnnnnnnnnnnnnnnnnnnnnnnnnnnnnnnnnnnnnnnnnnnnnnnnnnnnnnnnnnnnnnnnnnnnnnnnnnnnnnnnnnnnnnnnnnnnnnnnnnnnnnnnnnnnnnnnnnnnnnnnnnnnnnnnnnnnnnnnnnnnnnnnnnnnnnnnnnnnnnnnnnnnnnnnnnnnnnnnnnnnnnnnnnnnnnnnnnnnnnnnnnnnnnnnnnnnnnnnnnnnnnnnnnnnnnnnnnnnnnnnnnnnnnnnnnnnnnnnnnnnnnnnnnnnnnnnnnnnnnnnnnnnnnnnnnnnnnnnnnnnnnnnnnnnnnnnnnnnnnnnnnnnnnnnnnnnnnnnnnnnnnnnnnnnnnnnnnnnnnnnnnnnnnnnnnnnnnnnnnnnnnnnnnnnnnnnnnnnnnnnnnnnnnnnnnnnnnnnnnnnnnnnnnnnnnnnnnnnnnnnnnnnnnnnnnnnnnnnnnnnnnnnnnnnnnnnnnnnnnnnnnnnnnnnnnnnnnnnnnnnnnnnnnnnnnnnnnnnnnnnnnnnnnnnnnnnnnnnnnnnnnnnnnnnnnnnnnnnnnnnnnnnnnnnnnnnnnnnnnnnnnnnnnnnnnnnnnnnnnnnnnnnnnnnnnnnnnnnnnnnnnnnnnnnnnnnnnnnnnnnnnnnnnnnnnnnnnnnnnnnnnnnnnnnnnnnnnnnnnnnnnnnnnnnnnnnnnnnnnnnnnnnnnnnnnnnnnnnnnnnnnnnnnnnnnnnnnnnnnnnnnnnnnnnnnnnnnnnnnnnnnnnnnnnnnnnnnnnnnnnnnnnnnnnnnnnnnnnnnnnnnnnnnnnnnnnnnnnnnnnnnnnnnnnnnnnnnnnnnnnnnnnnnnnnnnnnnnnnnnnnnnnnnnnnnnnnnnnnnnnnnnnnnnnnnnnnnnnnnnnnnnnnnnnnnnnnnnnnnnnnnnnnnnnnnnnnnnnnnnnnnnnnnnnnnnnnnnnnnnnnnnnnnnnnnnnnnnnnnnnnnnnnnnnnnnnnnnnnnnnnnnnnnnnnnnnnnnnnnnnnnnnnnnnnnnnnnnnnnnnnnnnnnnnnnnnnnnnnnnnnnnnnnnnnnnnnnnnnnnnnnnnnnnnnnnnnnnnnnnnnnnnnnnnnnnnnnnnnnnnnnnnnnnnnnnnnnnnnnnnnnnnnnnnnnnnnnnnnnnnnnnnnnnnnnnnnnnnnnnnnnnnnnnnnnnnnnnnnnnnnnnnnnnnnnnnnnnnnnnnnnnnnnnnnnnnnnnnnnnnnnnnnnnnnnnnnnnnnnnnnnnnnnnnnnnnnnnnnnnnnnnnnnnnnnnnnnnnnnnnnnnnnnnnnnnnnnnnnnnnnnnnnnnnnnnnnnnnnnnnnnnnnnnnnnnnnnnnnnnnnnnnnnnnnnnnnnnnnnnnnnnnnnnnnnnnnnnnnnnnnnnnnnnnnnnnnnnnnnnnnnnnnnnnnnnnnnnnnnnnnnnnnnnnnnnnnnnnnnnnnnnnnnnnnnnnnnnnnnnnnnnnnnnnnnnnnnnnnnnnnnnnnnnnnnnnnnnnnnnnnnnnnnnnnnnnnnnnnnnnnnnnnnnnnnnnnnnnnnnnnnnnnnnnnnnnnnnnnnnnnnnnnnnnnnnnnnnnnnnnnnnnnnnnnnnnnnnnnnnnnnnnnnnnnnnnnnnnnnnnnnnnnnnnnnnnnnnnnnnnnnnnnnnnnnnnnnnnnnnnnnnnnnnnnnnnnnnnnnnnnnnnnnnnnnnnnnnnnnnnnnnnnnnnnnnnnnnnnnnnnnnnnnnnnnnnnnnnnnnnnnnnnnnnnnnnnnnnnnnnnnnnnnnnnnnnnnnnnnnnnnnnnnnnnnnnnnnnnnnnnnnnnnnnnnnnnnnnnnnnnnnnnnnnnnnnnnnnnnnnnnnnnnnnnnnnnnnnnnnnnnnnnnnnnnnnnnnnnnnnnnnnnnnnnnnnnnnnnnnnnnnnnnnnnnnnnnnnnnnnnnnnnnnnnnnnnnnnnnnnnnnnnnnnnnnnnnnnnnnnnnnnnnnnnnnnnnnnnnnnnnnnnnnnnnnnnnnnnnnnnnnnnnnnnnnnnnnnnnnnnnnnnnnnnnnnnnnnnnnnnnnnnnnnnnnnnnnnnnnnnnnnnnnnnnnnnnnnnnnnnnnnnnnnnnnnnnnnnnnnnnnnnnnnnnnnnnnnnnnnnnnnnnnnnnnnnnnnnnnnnnnnnnnnnnnnnnnnnnnnnnnnnnnnnnnnnnnnnnnnnnnnnnnnnnnnnnnnnnnnnnnnnnnnnnnnnnnnnnnnnnnnnnnnnnnnnnnnnnnnnnnnnnnnnnnnnnnnnnnnnnnnnnnnnnnnnnnnnnnnnnnnnnnnnnnnnnnnnnnnnnnnnnnnnnnnnnnnnnnnnnnnnnnnnnnnnnnnnnnnnnnnnnnnnnnnnnnnnnnnnnnnnnnnnnnnnnnnnnnnnnnnnnnnnnnnnnnnnnnnnnnnnnnnnnnnnnnnnnnnnnnnnnnnnnnnnnnnnnnnnnnnnnnnnnnnnnnnnnnnnnnnnnnnnnnnnnnnnnnnnnnnnnnnnnnnnnnnnnnnnnnnnnnnnnnnnnnnnnnnnnnnnnnnnnnnnnnnnnnnnnnnnnnnnnnnnnnnnnnnnnnnnnnnnnnnnnnnnnnnnnnnnnnnnnnnnnnnnnnnnnnnnnnnnnnnnnnnnnnnnnnnnnnnnnnnnnnnnnnnnnnnnnnnnnnnnnnnnnnnnnnnnnnnnnnnnnnnnnnnnnnnnnnnnnnnnnnnnnnnnnnnnnnnnnnnnnnnnnnnnnnnnnnnnnnnnnnnnnnnnnnnnnnnnnnnnnnnnnnnnnnnnnnnnnnnnnnnnnnnnnnnnnnnnnnnnnnnnnnnnnnnnnnnnnnnnnnnnnnnnnnnnnnnnnnnnnnnnnnnnnnnnnnnnnnnnnnnnnnnnnnnnnnnnnnnnnnnnnnnnnnnnnnnnnnnnnnnnnnnnnnnnnnnnnnnnnnnnnnnnnnnnnnnnnnnnnnnnnnnnnnnnnnnnnnnnnnnnnnnnnnnnnnnnnnnnnnnnnnnnnnnnnnnnnnnnnnnnnnnnnnnnnnnnnnnnnnnnnnnnnnnnnnnnnnnnnnnnnnnnnnnnnnnnnnnnnnnnnnnnnnnnnnnnnnnnnnnnnnnnnnnnnnnnnnnnnnnnnnnnnnnnnnnnnnnnnnnnnnnnnnnnnnnnnnnnnnnnnnnnnnnnnnnnnnnnnnnnnnnnnnnnnnnnnnnnnnnnnnnnnnnnnnnnnnnnnnnnnnnnnnnnnnnnnnnnnnnnnnnnnnnnnnnnnnnnnnnnnnnnnnnnnnnnnnnnnnnnnnnnnnnnnnnnnnnnnnnnnnnnnnnnnnnnnnnnnnnnnnnnnnnnnnnnnnnnnnnnnnnnnnnnnnnnnnnnnnnnnnnnnnnnnnnnnnnnnnnnnnnnnnnnnnnnnnnnnnnnnnnnnnnnnnnnnnnnnnnnnnnnnnnnnnnnnnnnnnnnnnnnnnnnnnnnnnnnnnnnnnnnnnnnnnnnnnnnnnnnnnnnnnnnnnnnnnnnnnnnnnnnnnnnnnnnnnnnnnnnnnnnnnnnnnnnnnnnnnnnnnnnnnnnnnnnnnnnnnnnnnnnnnnnnnnnnnnnnnnnnnnnnnnnnnnnnnnnnnnnnnnnnnnnnnnnnnnnnnnnnnnnnnnnnnnnnnnnnnnnnnnnnnnnnnnnnnnnnnnnnnnnnnnnnnnnnnnnnnnnnnnnnnnnnnnnnnnnnnnnnnnnnnnnnnnnnnnnnnnnnnnnnnnnnnnnnnnnnnnnnnnnnnnnnnnnnnnnnnnnnnnnnnnnnnnnnnnnnnnnnnnnnnnnnnnnnnnnnnnnnnnnnnnnnnnnnnnnnnnnnnnnnnnnnnnnnnnnnnnnnnnnnnnnnnnnnnnnnnnnnnnnnnnnnnnnnnnnnnnnnnnnnnnnnnnnnnnnnnnnnnnnnnnnnnnnnnnnnnnnnnnnnnnnnnnnnnnnnnnnnnnnnnnnnnnnnnnnnnnnnnnnnnnnnnnnnnnnnnnnnnnnnnnnnnnnnnnnnnnnnnnnnnnnnnnnnnnnnnnnnnnnnnnnnnnnnnnnnnnnnnnnnnnnnnnnnnnnnnnnnnnnnnnnnnnnnnnnnnnnnnnnnnnnnnnnnnnnnnnnnnnnnnnnnnnnnnnnnnnnnnnnnnnnnnnnnnnnnnnnnnnnnnnnnnnnnnnnnnnnnnnnnnnnnnnnnnnnnnnnnnnnnnnnnnnnnnnnnnnnnnnnnnnnnnnnnnnnnnnnnnnnnnnnnnnnnnnnnnnnnnnnnnnnnnnnnnnnnnnnnnnnnnnnnnnnnnnnnnnnnnnnnnnnnnnnnnnnnnnnnnnnnnnnnnnnnnnnnnnnnnnnnnnnnnnnnnnnnnnnnnnnnnnnnnnnnnnnnnnnnnnnnnnnnnnnnnnnnnnnnnnnnnnnnnnnnnnnnnnnnnnnnnnnnnnnnnnnnnnnnnnnnnnnnnnnnnnnnnnnnnnnnnnnnnnnnnnnnnnnnnnnnnnnnnnnnnnnnnnnnnnnnnnnnnnnnnnnnnnnnnnnnnnnnnnnnnnnnnnnnnnnnnnnnnnnnnnnnnnnnnnnnnnnnnnnnnnnnnnnnnnnnnnnnnnnnnnnnnnnnnnnnnnnnnnnnnnnnnnnnnnnnnnnnnnnnnnnnnnnnnnnnnnnnnnnnnnnnnnnnnnnnnnnnnnnnnnnnnnnnnnnnnnnnnnnnnnnnnnnnnnnnnnnnnnnnnnnnnnnnnnnnnnnnnnnnnnnnnnnnnnnnnnnnnnnnnnnnnnnnnnnnnnnnnnnnnnnnnnnnnnnnnnnnnnnnnnnnnnnnnnnnnnnnnnnnnnnnnnnnnnnnnnnnnnnnnnnnnnnnnnnnnnnnnnnnnnnnnnnnnnnnnnnnnnnnnnnnnnnnnnnnnnnnnnnnnnnnnnnnnnnnnnnnnnnnnnnnnnnnnnnnnnnnnnnnnnnnnnnnnnnnnnnnnnnnnnnnnnnnnnnnnnnnnnnnnnnnnnnnnnnnnnnnnnnnnnnnnnnnnnnnnnnnnnnnnnnnnnnnnnnnnnnnnnnnnnnnnnnnnnnnnnnnnnnnnnnnnnnnnnnnnnnnnnnnnnnnnnnnnnnnnnnnnnnnnnnnnnnnnnnnnnnnnnnnnnnnnnnnnnnnnnnnnnnnnnnnnnnnnnnnnnnnnnnnnnnnnnnnnnnnnnnnnnnnnnnnnnnnnnnnnnnnnnnnnnnnnnnnnnnnnnnnnnnnnnnnnnnnnnnnnnnnnnnnnnnnnnnnnnnnnnnnnnnnnnnnnnnnnnnnnnnnnnnnnnnnnnnnnnnnnnnnnnnnnnnnnnnnnnnnnnnnnnnnnnnnnnnnnnnnnnnnnnnnnnnnnnnnnnnnnnnnnnnnnnnnnnnnnnnnnnnnnnnnnnnnnnnnnnnnnnnnnnnnnnnnnnnnnnnnnnnnnnnnnnnnnnnnnnnnnnnnnnnnnnnnnnnnnnnnnnnnnnnnnnnnnnnnnnnnnnnnnnnnnnnnnnnnnnnnnnnnnnnnnnnnnnnnnnnnnnnnnnnnnnnnnnnnnnnnnnnnnnnnnnnnnnnnnnnnnnnnnnnnnnnnnnnnnnnnnnnnnnnnnnnnnnnnnnnnnnnnnnnnnnnnnnnnnnnnnnnnnnnnnnnnnnnnnnnnnnnnnnnnnnnnnnnnnnnnnnnnnnnnnnnnnnnnnnnnnnnnnnnnnnnnnnnnnnnnnnnnnnnnnnnnnnnnnnnnnnnnnnnnnnnnnnnnnnnnnnnnnnnnnnnnnnnnnnnnnnnnnnnnnnnnnnnnnnnnnnnnnnnnnnnnnnnnnnnnnnnnnnnnnnnnnnnnnnnnnnnnnnnnnnnnnnnnnnnnnnnnnnnnnnnnnnnnnnnnnnnnnnnnnnnnnnnnnnnnnnnnnnnnnnnnnnnnnnnnnnnnnnnnnnnnnnnnnnnnnnnnnnnnnnnnnnnnnnnnnnnnnnnnnnnnnnnnnnnnnnnnnnnnnnnnnnnnnnnnnnnnnnnnnnnnnnnnnnnnnnnnnnnnnnnnnnnnnnnnnnnnnnnnnnnnnnnnnnnnnnnnnnnnnnnnnnnnnnnnnnnnnnnnnnnnnnnnnnnnnnnnnnnnnnnnnnnnnnnnnnnnnnnnnnnnnnnnnnnnnnnnnnnnnnnnnnnnnnnnnnnnnnnnnnnnnnnnnnnnnnnnnnnnnnnnnnnnnnnnnnnnnnnnnnnnnnnnnnnnnnnnnnnnnnnnnnnnnnnnnnnnnnnnnnnnnnnnnnnnnnnnnnnnnnnnnnnnnnnnnnnnnnnnnnnnnnnnnnnnnnnnnnnnnnnnnnnnnnnnnnnnnnnnnnnnnnnnnnnnnnnnnnnnnnnnnnnnnnnnnnnnnnnnnnnnnnnnnnnnnnnnnnnnnnnnnnnnnnnnnnnnnnnnnnnnnnnnnnnnnnnnnnnnnnnnnnnnnnnnnnnnnnnnnnnnnnnnnnnnnnnnnnnnnnnnnnnnnnnnnnnnnnnnnnnnnnnnnnnnnnnnnnnnnnnnnnnnnnnnnnnnnnnnnnnnnnnnnnnnnnnnnnnnnnnnnnnnnnnnnnnnnnnnnnnnnnnnnnnnnnnnnnnnnnnnnnnnnnnnnnnnnnnnnnnnnnnnnnnnnnnnnnnnnnnnnnnnnnnnnnnnnnnnnnnnnnnnnnnnnnnnnnnnnnnnnnnnnnnnnnnnnnnnnnnnnnnnnnnnnnnnnnnnnnnnnnnnnnnnnnnnnnnnnnnnnnnnnnnnnnnnnnnnnnnnnnnnnnnnnnnnnnnnnnnnnnnnnnnnnnnnnnnnnnnnnnnnnnnnnnnnnnnnnnnnnnnnnnnnnnnnnnnnnnnnnnnnnnnnnnnnnnnnnnnnnnnnnnnnnnnnnnnnnnnnnnnnnnnnnnnnnnnnnnnnnnnnnnnnnnnnnnnnnnnnnnnnnnnnnnnnnnnnnnnnnnnnnnnnnnnnnnnnnnnnnnnnnnnnnnnnnnnnnnnnnnnnnnnnnnnnnnnnnnnnnnnnnnnnnnnnnnnnnnnnnnnnnnnnnnnnnnnnnnnnnnnnnnnnnnnnnnnnnnnnnnnnnnnnnnnnnnnnnnnnnnnnnnnnnnnnnnnnnnnnnnnnnnnnnnnnnnnnnnnnnnnnnnnnnnnnnnnnnnnnnnnnnnnnnnnnnnnnnnnnnnnnnnnnnnnnnnnnnnnnnnnnnnnnnnnnnnnnnnnnnnnnnnnnnnnnnnnnnnnnnnnnnnnnnnnnnnnnnnnnnnnnnnnnnnnnnnnnnnnnnnnnnnnnnnnnnnnnnnnnnnnnnnnnnnnnnnnnnnnnnnnnnnnnnnnnnnnnnnnnnnnnnnnnnnnnnnnnnnnnnnnnnnnnnnnnnnnnnnnnnnnnnnnnnnnnnnnnnnnnnnnnnnnnnnnnnnnnnnnnnnnnnnnnnnnnnnnnnnnnnnnnnnnnnnnnnnnnnnnnnnnnnnnnnnnnnnnnnnnnnnnnnnnnnnnnnnnnnnnnnnnnnnnnnnnnnnnnnnnnnnnnnnnnnnnnnnnnnnnnnnnnnnnnnnnnnnnnnnnnnnnnnnnnnnnnnnnnnnnnnnnnnnnnnnnnnnnnnnnnnnnnnnnnnnnnnnnnnnnnnnnnnnnnnnnnnnnnnnnnnnnnnnnnnnnnnnnnnnnnnnnnnnnnnnnnnnnnnnnnnnnnnnnnnnnnnnnnnnnnnnnnnnnnnnnnnnnnnnnnnnnnnnnnnnnnnnnnnnnnnnnnnnnnnnnnnnnnnnnnnnnnnnnnnnnnnnnnnnnnnnnnnnnnnnnnnnnnnnnnnnnnnnnnnnnnnnnnnnnnnnnnnnnnnnnnnnnnnnnnnnnnnnnnnnnnnnnnnnnnnnnnnnnnnnnnnnnnnnnnnnnnnnnnnnnnnnnnnnnnnnnnnnnnnnnnnnnnnnnnnnnnnnnnnnnnnnnnnnnnnnnnnnnnnnnnnnnnnnnnnnnnnnnnnnnnnnnnnnnnnnnnnnnnnnnnnnnnnnnnnnnnnnnnnnnnnnnnnnnnnnnnnnnnnnnnnnnnnnnnnnnnnnnnnnnnnnnnnnnnnnnnnnnnnnnnnnnnnnnnnnnnnnnnnnnnnnnnnnnnnnnnnnnnnnnnnnnnnnnnnnnnnnnnnnnnnnnnnnnnnnnnnnnnnnnnnnnnnnnnnnnnnnnnnnnnnnnnnnnnnnnnnnnnnnnnnnnnnnnnnnnnnnnnnnnnnnnnnnnnnnnnnnnnnnnnnnnnnnnnnnnnnnnnnnnnnnnnnnnnnnnnnnnnnnnnnnnnnnnnnnnnnnnnnnnnnnnnnnnnnnnnnnnnnnnnnnnnnnnnnnnnnnnnnnnnnnnnnnnnnnnnnnnnnnnnnnnnnnnnnnnnnnnnnnnnnnnnnnnnnnnnnnnnnnnnnnnnnnnnnnnnnnnnnnnnnnnnnnnnnnnnnnnnnnnnnnnnnnnnnnnnnnnnnnnnnnnnnnnnnnnnnnnnnnnnnnnnnnnnnnnnnnnnnnnnnnnnnnnnnnnnnnnnnnnnnnnnnnnnnnnnnnnnnnnnnnnnnnnnnnnnnnnnnnnnnnnnnnnnnnnnnnnnnnnnnnnnnnnnnnnnnnnnnnnnnnnnnnnnnnnnnnnnnnnnnnnnnnnnnnnnnnnnnnnnnnnnnnnnnnnnnnnnnnnnnnnnnnnnnnnnnnnnnnnnnnnnnnnnnnnnnnnnnnnnnnnnnnnnnnnnnnnnnnnnnnnnnnnnnnnnnnnnnnnnnnnnnnnnnnnnnnnnnnnnnnnnnnnnnnnnnnnnnnnnnnnnnnnnnnnnnnnnnnnnnnnnnnnnnnnnnnnnnnnnnnnnnnnnnnnnnnnnnnnnnnnnnnnnnnnnnnnnnnnnnnnnnnnnnnnnnnnnnnnnnnnnnnnnnnnnnnnnnnnnnnnnnnnnnnnnnnnnnnnnnnnnnnnnnnnnnnnnnnnnnnnnnnnnnnnnnnnnnnnnnnnnnnnnnnnnnnnnnnnnnnnnnnnnnnnnnnnnnnnnnnnnnnnnnnnnnnnnnnnnnnnnnnnnnnnnnnnnnnnnnnnnnnnnnnnnnnnnnnnnnnnnnnnnnnnnnnnnnnnnnnnnnnnnnnnnnnnnnnnnnnnnnnnnnnnnnnnnnnnnnnnnnnnnnnnnnnnnnnnnnnnnnnnnnnnnnnnnnnnnnnnnnnnnnnnnnnnnnnnnnnnnnnnnnnnnnnnnnnnnnnnnnnnnnnnnnnnnnnnnnnnnnnnnnnnnnnnnnnnnnnnnnnnnnnnnnnnnnnnnnnnnnnnnnnnnnnnnnnnnnnnnnnnnnnnnnnnnnnnnnnnnnnnnnnnnnnnnnnnnnnnnnnnnnnnnnnnnnnnnnnnnnnnnnnnnnnnnnnnnnnnnnnnnnnnnnnnnnnnnnnnnnnnnnnnnnnnnnnnnnnnnnnnnnnnnnnnnnnnnnnnnnnnnnnnnnnnnnnnnnnnnnnnnnnnnnnnnnnnnnnnnnnnnnnnnnnnnnnnnnnnnnnnnnnnnnnnnnnnnnnnnnnnnnnnnnnnnnnnnnnnnnnnnnnnnnnnnnnnnnnnnnnnnnnnnnnnnnnnnnnnnnnnnnnnnnnnnnnnnnnnnnnnnnnnnnnnnnnnnnnnnnnnnnnnnnnnnnnnnnnnnnnnnnnnnnnnnnnnnnnnnnnnnnnnnnnnnnnnnnnnnnnnnnnnnnnnnnnnnnnnnnnnnnnnnnnnnnnnnnnnnnnnnnnnnnnnnnnnnnnnnnnnnnnnnnnnnnnnnnnnnnnnnnnnnnnnnnnnnnnnnnnnnnnnnnnnnnnnnnnnnnnnnnnnnnnnnnnnnnnnnnnnnnnnnnnnnnnnnnnnnnnnnnnnnnnnnnnnnnnnnnnnnnnnnnnnnnnnnnnnnnnnnnnnnnnnnnnnnnnnnnnnnnnnnnnnnnnnnnnnnnnnnnnnnnnnnnnnnnnnnnnnnnnnnnnnnnnnnnnnnnnnnnnnnnnnnnnnnnnnnnnnnnnnnnnnnnnnnnnnnnnnnnnnnnnnnnnnnnnnnnnnnnnnnnnnnnnnnnnnnnnnnnnnnnnnnnnnnnnnnnnnnnnnnnnnnnnnnnnnnnnnnnnnnnnnnnnnnnnnnnnnnnnnnnnnnnnnnnnnnnnnnnnnnnnnnnnnnnnnnnnnnnnnnnnnnnnnnnnnnnnnnnnnnnnnnnnnnnnnnnnnnnnnnnnnnnnnnnnnnnnnnnnnnnnnnnnnnnnnnnnnnnnnnnnnnnnnnnnnnnnnnnnnnnnnnnnnnnnnnnnnnnnnnnnnnnnnnnnnnnnnnnnnnnnnnnnnnnnnnnnnnnnnnnnnnnnnnnnnnnnnnnnnnnnnnnnnnnnnnnnnnnnnnnnnnnnnnnnnnnnnnnnnnnnnnnnnnnnnnnnnnnnnnnnnnnnnnnnnnnnnnnnnnnnnnnnnnnnnnnnnnnnnnnnnnnnnnnnnnnnnnnnnnnnnnnnnnnnnnnnnnnnnnnnnnnnnnnnnnnnnnnnnnnnnnnnnnnnnnnnnnnnnnnnnnnnnnnnnnnnnnnnnnnnnnnnnnnnnnnnnnnnnnnnnnnnnnnnnnnnnnnnnnnnnnnnnnnnnnnnnnnnnnnnnnnnnnnnnnnnnnnnnnnnnnnnnnnnnnnnnnnnnnnnnnnnnnnnnnnnnnnnnnnnnnnnnnnnnnnnnnnnnnnnnnnnnnnnnnnnnnnnnnnnnnnnnnnnnnnnnnnnnnnnnnnnnnnnnnnnnnnnnnnnnnnnnnnnnnnnnnnnnnnnnnnnnnnnnnnnnnnnnnnnnnnnnnnnnnnnnnnnnnnnnnnnnnnnnnnnnnnnnnnnnnnnnnnnnnnnnnnnnnnnnnnnnnnnnnnnnnnnnnnnnnnnnnnnnnnnnnnnnnnnnnnnnnnnnnnnnnnnnnnnnnnnnnnnnnnnnnnnnnnnnnnnnnnnnnnnnnnnnnnnnnnnnnnnnnnnnnnnnnnnnnnnnnnnnnnnnnnnnnnnnnnnnnnnnnnnnnnnnnnnnnnnnnnnnnnnnnnnnnnnnnnnnnnnnnnnnnnnnnnnnnnnnnnnnnnnnnnnnnnnnnnnnnnnnnnnnnnnnnnnnnnnnnnnnnnnnnnnnnnnnnnnnnnnnnnnnnnnnnnnnnnnnnnnnnnnnnnnnnnnnnnnnnnnnnnnnnnnnnnnnnnnnnnnnnnnnnnnnnnnnnnnnnnnnnnnnnnnnnnnnnnnnnnnnnnnnnnnnnnnnnnnnnnnnnnnnnnnnnnnnnnnnnnnnnnnnnnnnnnnnnnnnnnnnnnnnnnnnnnnnnnnnnnnnnnnnnnnnnnnnnnnnnnnnnnnnnnnnnnnnnnnnnnnnnnnnnnnnnnnnnnnnnnnnnnnnnnnnnnnnnnnnnnnnnnnnnnnnnnnnnnnnnnnnnnnnnnnnnnnnnnnnnnnnnnnnnnnnnnnnnnnnnnnnnnnnnnnnnnnnnnnnnnnnnnnnnnnnnnnnnnnnnnnnnnnnnnnnnnnnnnnnnnnnnnnnnnnnnnnnnnnnnnnnnnnnnnnnnnnnnnnnnnnnnnnnnnnnnnnnnnnnnnnnnnnnnnnnnnnnnnnnnnnnnnnnnnnnnnnnnnnnnnnnnnnnnnnnnnnnnnnnnnnnnnnnnnnnnnnnnnnnnnnnnnnnnnnnnnnnnnnnnnnnnnnnnnnnnnnnnnnnnnnnnnnnnnnnnnnnnnnnnnnnnnnnnnnnnnnnnnnnnnnnnnnnnnnnnnnnnnnnnnnnnnnnnnnnnnnnnnnnnnnnnnnnnnnnnnnnnnnnnnnnnnnnnnnnnnnnnnnnnnnnnnnnnnnnnnnnnnnnnnnnnnnnnnnnnnnnnnnnnnnnnnnnnnnnnnnnnnnnnnnnnnnnnnnnnnnnnnnnnnnnnnnnnnnnnnnnnnnnnnnnnnnnnnnnnnnnnnnnnnnnnnnnnnnnnnnnnnnnnnnnnnnnnnnnnnnnnnnnnnnnnnnnnnnnnnnnnnnnnnnnnnnnnnnnnnnnnnnnnnnnnnnnnnnnnnnnnnnnnnnnnnnnnnnnnnnnnnnnnnnnnnnnnnnnnnnnnnnnnnnnnnnnnnnnnnnnnnnnnnnnnnnnnnnnnnnnnnnnnnnnnnnnnnnnnnnnnnnnnnnnnnnnnnnnnnnnnnnnnnnnnnnnnnnnnnnnnnnnnnnnnnnnnnnnnnnnnnnnnnnnnnnnnnnnnnnnnnnnnnnnnnnnnnnnnnnnnnnnnnnnnnnnnnnnnnnnnnnnnnnnnnnnnnnnnnnnnnnnnnnnnnnnnnnnnnnnnnnnnnnnnnnnnnnnnnnnnnnnnnnnnnnnnnnnnnnnnnnnnnnnnnnnnnnnnnnnnnnnnnnnnnnnnnnnnnnnnnnnnnnnnnnnnnnnnnnnnnnnnnnnnnnnnnnnnnnnnnnnnnnnnnnnnnnnnnnnnnnnnnnnnnnnnnnnnnnnnnnnnnnnnnnnnnnnnnnnnnnnnnnnnnnnnnnnnnnnnnnnnnnnnnnnnnnnnnnnnnnnnnnnnnnnnnnnnnnnnnnnnnnnnnnnnnnnnnnnnnnnnnnnnnnnnnnnnnnnnnnnnnnnnnnnnnnnnnnnnnnnnnnnnnnnnnnnnnnnnnnnnnnnnnnnnnnnnnnnnnnnnnnnnnnnnnnnnnnnnnnnnnnnnnnnnnnnnnnnnnnnnnnnnnnnnnnnnnnnnnnnnnnnnnnnnnnnnnnnnnnnnnnnnnnnnnnnnnnnnnnnnnnnnnnnnnnnnnnnnnnnnnnnnnnnnnnnnnnnnnnnnnnnnnnnnnnnnnnnnnnnnnnnnnnnnnnnnnnnnnnnnnnnnnnnnnnnnnnnnnnnnnnnnnnnnnnnnnnnnnnnnnnnnnnnnnnnnnnnnnnnnnnnnnnnnnnnnnnnnnnnnnnnnnnnnnnnnnnnnnnnnnnnnnnnnnnnnnnnnnnnnnnnnnnnnnnnnnnnnnnnnnnnnnnnnnnnnnnnnnnnnnnnnnnnnnnnnnnnnnnnnnnnnnnnnnnnnnnnnnnnnnnnnnnnnnnnnnnnnnnnnnnnnnnnnnnnnnnnnnnnnnnnnnnnnnnnnnnnnnnnnnnnnnnnnnnnnnnnnnnnnnnnnnnnnnnnnnnnnnnnnnnnnnnnnnnnnnnnnnnnnnnnnnnnnnnnnnnnnnnnnnnnnnnnnnnnnnnnnnnnnnnnnnnnnnnnnnnnnnnnnnnnnnnnnnnnnnnnnnnnnnnnnnnnnnnnnnnnnnnnnnnnnnnnnnnnnnnnnnnnnnnnnnnnnnnnnnnnnnnnnnnnnnnnnnnnnnnnnnnnnnnnnnnnnnnnnnnnnnnnnnnnnnnnnnnnnnnnnnnnnnnnnnnnnnnnnnnnnnnnnnnnnnnnnnnnnnnnnnnnnnnnnnnnnnnnnnnnnnnnnnnnnnnnnnnnnnnnnnnnnnnnnnnnnnnnnnnnnnnnnnnnnnnnnnnnnnnnnnnnnnnnnnnnnnnnnnnnnnnnnnnnnnnnnnnnnnnnnnnnnnnnnnnnnnnnnnnnnnnnnnnnnnnnnnnnnnnnnnnnnnnnnnnnnnnnnnnnnnnnnnnnnnnnnnnnnnnnnnnnnnnnnnnnnnnnnnnnnnnnnnnnnnnnnnnnnnnnnnnnnnnnnnnnnnnnnnnnnnnnnnnnnnnnnnnnnnnnnnnnnnnnnnnnnnnnnnnnnnnnnnnnnnnnnnnnnnnnnnnnnnnnnnnnnnnnnnnnnnnnnnnnnnnnnnnnnnnnnnnnnnnnnnnnnnnnnnnnnnnnnnnnnnnnnnnnnnnnnnnnnnnnnnnnnnnnnnnnnnnnnnnnnnnnnnnnnnnnnnnnnnnnnnnnnnnnnnnnnnnnnnnnnnnnnnnnnnnnnnnnnnnnnnnnnnnnnnnnnnnnnnnnnnnnnnnnnnnnnnnnnnnnnnnnnnnnnnnnnnnnnnnnnnnnnnnnnnnnnnnnnnnnnnnnnnnnnnnnnnnnnnnnnnnnnnnnnnnnnnnnnnnnnnnnnnnnnnnnnnnnnnnnnnnnnnnnnnnnnnnnnnnnnnnnnnnnnnnnnnnnnnnnnnnnnnnnnnnnnnnnnnnnnnnnnnnnnnnnnnnnnnnnnnnnnnnnnnnnnnnnnnnnnnnnnnnnnnnnnnnnnnnnnnnnnnnnnnnnnnnnnnnnnnnnnnnnnnnnnnnnnnnnnnnnnnnnnnnnnnnnnnnnnnnnnnnnnnnnnnnnnnnnnnnnnnnnnnnnnnnnnnnnnnnnnnnnnnnnnnnnnnnnnnnnnnnnnnnnnnnnnnnnnnnnnnnnnnnnnnnnnnnnnnnnnnnnnnnnnnnnnnnnnnnnnnnnnnnnnnnnnnnnnnnnnnnnnnnnnnnnnnnnnnnnnnnnnnnnnnnnnnnnnnnnnnnnnnnnnnnnnnnnnnnnnnnnnnnnnnnnnnnnnnnnnnnnnnnnnnnnnnnnnnnnnnnnnnnnnnnnnnnnnnnnnnnnnnnnnnnnnnnnnnnnnnnnnnnnnnnnnnnnnnnnnnnnnnnnnnnnnnnnnnnnnnnnnnnnnnnnnnnnnnnnnnnnnnnnnnnnnnnnnnnnnnnnnnnnnnnnnnnnnnnnnnnnnnnnnnnnnnnnnnnnnnnnnnnnnnnnnnnnnnnnnnnnnnnnnnnnnnnnnnnnnnnnnnnnnnnnnnnnnnnnnnnnnnnnnnnnnnnnnnnnnnnnnnnnnnnnnnnnnnnnnnnnnnnnnnnnnnnnnnnnnnnnnnnnnnnnnnnnnnnnnnnnnnnnnnnnnnnnnnnnnnnnnnnnnnnnnnnnnnnnnnnnnnnnnnnnnnnnnnnnnnnnnnnnnnnnnnnnnnnnnnnnnnnnnnnnnnnnnnnnnnnnnnnnnnnnnnnnnnnnnnnnnnnnnnnnnnnnnnnnnnnnnnnnnnnnnnnnnnnnnnnnnnnnnnnnnnnnnnnnnnnnnnnnnnnnnnnnnnnnnnnnnnnnnnnnnnnnnnnnnnnnnnnnnnnnnnnnnnnnnnnnnnnnnnnnnnnnnnnnnnnnnnnnnnnnnnnnnnnnnnnnnnnnnnnnnnnnnnnnnnnnnnnnnnnnnnnnnnnnnnnnnnnnnnnnnnnnnnnnnnnnnnnnnnnnnnnnnnnnnnnnnnnnnnnnnnnnnnnnnnnnnnnnnnnnnnnnnnnnnnnnnnnnnnnnnnnnnnnnnnnnnnnnnnnnnnnnnnnnnnnnnnnnnnnnnnnnnnnnnnnnnnnnnnnnnnnnnnnnnnnnnnnnnnnnnnnnnnnnnnnnnnnnnnnnnnnnnnnnnnnnnnnnnnnnnnnnnnnnnnnnnnnnnnnnnnnnnnnnnnnnnnnnnnnnnnnnnnnnnnnnnnnnnnnnnnnnnnnnnnnnnnnnnnnnnnnnnnnnnnnnnnnnnnnnnnnnnnnnnnnnnnnnnnnnnnnnnnnnnnnnnnnnnnnnnnnnnnnnnnnnnnnnnnnnnnnnnnnnnnnnnnnnnnnnnnnnnnnnnnnnnnnnnnnnnnnnnnnnnnnnnnnnnnnnnnnnnnnnnnnnnnnnnnnnnnnnnnnnnnnnnnnnnnnnnnnnnnnnnnnnnnnnnnnnnnnnnnnnnnnnnnnnnnnnnnnnnnnnnnnnnnnnnnnnnnnnnnnnnnnnnnnnnnnnnnnnnnnnnnnnnnnnnnnnnnnnnnnnnnnnnnnnnnnnnnnnnnnnnnnnnnnnnnnnnnnnnnnnnnnnnnnnnnnnnnnnnnnnnnnnnnnnnnnnnnnnnnnnnnnnnnnnnnnnnnnnnnnnnnnnnnnnnnnnnnnnnnnnnnnnnnnnnnnnnnnnnnnnnnnnnnnnnnnnnnnnnnnnnnnnnnnnnnnnnnnnnnnnnnnnnnnnnnnnnnnnnnnnnnnnnnnnnnnnnnnnnnnnnnnnnnnnnnnnnnnnnnnnnnnnnnnnnnnnnnnnnnnnnnnnnnnnnnnnnnnnnnnnnnnnnnnnnnnnnnnnnnnnnnnnnnnnnnnnnnnnnnnnnnnnnnnnnnnnnnnnnnnnnnnnnnnnnnnnnnnnnnnnnnnnnnnnnnnnnnnnnnnnnnnnnnnnnnnnnnnnnnnnnnnnnnnnnnnnnnnnnnnnnnnnnnnnnnnnnnnnnnnnnnnnnnnnnnnnnnnnnnnnnnnnnnnnnnnnnnnnnnnnnnnnnnnnnnnnnnnnnnnnnnnnnnnnnnnnnnnnnnnnnnnnnnnnnnnnnnnnnnnnnnnnnnnnnnnnnnnnnnnnnnnnnnnnnnnnnnnnnnnnnnnnnnnnnnnnnnnnnnnnnnnnnnnnnnnnnnnnnnnnnnnnnnnnnnnnnnnnnnnnnnnnnnnnnnnnnnnnnnnnnnnnnnnnnnnnnnnnnnnnnnnnnnnnnnnnnnnnnnnnnnnnnnnnnnnnnnnnnnnnnnnnnnnnnnnnnnnnnnnnnnnnnnnnnnnnnnnnnnnnnnnnnnnnnnnnnnnnnnnnnnnnnnnnnnnnnnnnnnnnnnnnnnnnnnnnnnnnnnnnnnnnnnnnnnnnnnnnnnnnnnnnnnnnnnnnnnnnnnnnnnnnnnnnnnnnnnnnnnnnnnnnnnnnnnnnnnnnnnnnnnnnnnnnnnnnnnnnnnnnnnnnnnnnnnnnnnnnnnnnnnnnnnnnnnnnnnnnnnnnnnnnnnnnnnnnnnnnnnnnnnnnnnnnnnnnnnnnnnnnnnnnnnnnnnnnnnnnnnnnnnnnnnnnnnnnnnnnnnnnnnnnnnnnnnnnnnnnnnnnnnnnnnnnnnnnnnnnnnnnnnnnnnnnnnnnnnnnnnnnnnnnnnnnnnnnnnnnnnnnnnnnnnnnnnnnnnnnnnnnnnnnnnnnnnnnnnnnnnnnnnnnnnnnnnnnnnnnnnnnnnnnnnnnnnnnnnnnnnnnnnnnnnnnnnnnnnnnnnnnnnnnnnnnnnnnnnnnnnnnnnnnnnnnnnnnnnnnnnnnnnnnnnnnnnnnnnnnnnnnnnnnnnnnnnnnnnnnnnnnnnnnnnnnnnnnnnnnnnnnnnnnnnnnnnnnnnnnnnnnnnnnnnnnnnnnnnnnnnnnnnnnnnnnnnnnnnnnnnnnnnnnnnnnnnnnnnnnnnnnnnnnnnnnnnnnnnnnnnnnnnnnnnnnnnnnnnnnnnnnnnnnnnnnnnnnnnnnnnnnnnnnnnnnnnnnnnnnnnnnnnnnnnnnnnnnnnnnnnnnnnnnnnnnnnnnnnnnnnnnnnnnnnnnnnnnnnnnnnnnnnnnnnnnnnnnnnnnnnnnnnnnnnnnnnnnnnnnnnnnnnnnnnnnnnnnnnnnnnnnnnnnnnnnnnnnnnnnnnnnnnnnnnnnnnnnnnnnnnnnnnnnnnnnnnnnnnnnnnnnnnnnnnnnnnnnnnnnnnnnnnnnnnnnnnnnnnnnnnnnnnnnnnnnnnnnnnnnnnnnnnnnnnnnnnnnnnnnnnnnnnnnnnnnnnnnnnnnnnnnnnnnnnnnnnnnnnnnnnnnnnnnnnnnnnnnnnnnnnnnnnnnnnnnnnnnnnnnnnnnnnnnnnnnnnnnnnnnnnnnnnnnnnnnnnnnnnnnnnnnnnnnnnnnnnnnnnnnnnnnnnnnnnnnnnnnnnnnnnnnnnnnnnnnnnnnnnnnnnnnnnnnnnnnnnnnnnnnnnnnnnnnnnnnnnnnnnnnnnnnnnnnnnnnnnnnnnnnnnnnnnnnnnnnnnnnnnnnnnnnnnnnnnnnnnnnnnnnnnnnnnnnnnnnnnnnnnnnnnnnnnnnnnnnnnnnnnnnnnnnnnnnnnnnnnnnnnnnnnnnnnnnnnnnnnnnnnnnnnnnnnnnnnnnnnnnnnnnnnnnnnnnnnnnnnnnnnnnnnnnnnnnnnnnnnnnnnnnnnnnnnnnnnnnnnnnnnnnnnnnnnnnnnnnnnnnnnnnnnnnnnnnnnnnnnnnnnnnnnnnnnnnnnnnnnnnnnnnnnnnnnnnnnnnnnnnnnnnnnnnnnnnnnnnnnnnnnnnnnnnnnnnnnnnnnnnnnnnnnnnnnnnnnnnnnnnnnnnnnnnnnnnnnnnnnnnnnnnnnnnnnnnnnnnnnnnnnnnnnnnnnnnnnnnnnnnnnnnnnnnnnnnnnnnnnnnnnnnnnnnnnnnnnnnnnnnnnnnnnnnnnnnnnnnnnnnnnnnnnnnnnnnnnnnnnnnnnnnnnnnnnnnnnnnnnnnnnnnnnnnnnnnnnnnnnnnnnnnnnnnnnnnnnnnnnnnnnnnnnnnnnnnnnnnnnnnnnnnnnnnnnnnnnnnnnnnnnnnnnnnnnnnnnnnnnnnnnnnnnnnnnnnnnnnnnnnnnnnnnnnnnnnnnnnnnnnnnnnnnnnnnnnnnnnnnnnnnnnnnnnnnnnnnnnnnnnnnnnnnnnnnnnnnnnnnnnnnnnnnnnnnnnnnnnnnnnnnnnnnnnnnnnnnnnnnnnnnnnnnnnnnnnnnnnnnnnnnnnnnnnnnnnnnnnnnnnnnnnnnnnnnnnnnnnnnnnnnnnnnnnnnnnnnnnnnnnnnnnnnnnnnnnnnnnnnnnnnnnnnnnnnnnnnnnnnnnnnnnnnnnnnnnnnnnnnnnnnnnnnnnnnnnnnnnnnnnnnnnnnnnnnnnnnnnnnnnnnnnnnnnnnnnnnnnnnnnnnnnnnnnnnnnnnnnnnnnnnnnnnnnnnnnnnnnnnnnnnnnnnnnnnnnnnnnnnnnnnnnnnnnnnnnnnnnnnnnnnnnnnnnnnnnnnnnnnnnnnnnnnnnnnnnnnnnnnnnnnnnnnnnnnnnnnnnnnnnnnnnnnnnnnnnnnnnnnnnnnnnnnnnnnnnnnnnnnnnnnnnnnnnnnnnnnnnnnnnnnnnnnnnnnnnnnnnnnnnnnnnnnnnnnnnnnnnnnnnnnnnnnnnnnnnnnnnnnnnnnnnnnnnnnnnnnnnnnnnnnnnnnnnnnnnnnnnnnnnnnnnnnnnnnnnnnnnnnnnnnnnnnnnnnnnnnnnnnnnnnnnnnnnnnnnnnnnnnnnnnnnnnnnnnnnnnnnnnnnnnnnnnnnnnnnnnnnnnnnnnnnnnnnnnnnnnnnnnnnnnnnnnnnnnnnnnnnnnnnnnnnnnnnnnnnnnnnnnnnnnnnnnnnnnnnnnnnnnnnnnnnnnnnnnnnnnnnnnnnnnnnnnnnnnnnnnnnnnnnnnnnnnnnnnnnnnnnnnnnnnnnnnnnnnnnnnnnnnnnnnnnnnnnnnnnnnnnnnnnnnnnnnnnnnnnnnnnnnnnnnnnnnnnnnnnnnnnnnnnnnnnnnnnnnnnnnnnnnnnnnnnnnnnnnnnnnnnnnnnnnnnnnnnnnnnnnnnnnnnnnnnnnnnnnnnnnnnnnnnnnnnnnnnnnnnnnnnnnnnnnnnnnnnnnnnnnnnnnnnnnnnnnnnnnnnnnnnnnnnnnnnnnnnnnnnnnnnnnnnnnnnnnnnnnnnnnnnnnnnnnnnnnnnnnnnnnnnnnnnnnnnnnnnnnnnnnnnnnnnnnnnnnnnnnnnnnnnnnnnnnnnnnnnnnnnnnnnnnnnnnnnnnnnnnnnnnnnnnnnnnnnnnnnnnnnnnnnnnnnnnnnnnnnnnnnnnnnnnnnnnnnnnnnnnnnnnnnnnnnnnnnnnnnnnnnnnnnnnnnnnnnnnnnnnnnnnnnnnnnnnnnnnnnnnnnnnnnnnnnnnnnnnnnnnnnnnnnnnnnnnnnnnnnnnnnnnnnnnnnnnnnnnnnnnnnnnnnnnnnnnnnnnnnnnnnnnnnnnnnnnnnnnnnnnnnnnnnnnnnnnnnnnnnnnnnnnnnnnnnnnnnnnnnnnnnnnnnnnnnnnnnnnnnnnnnnnnnnnnnnnnnnnnnnnnnnnnnnnnnnnnnnnnnnnnnnnnnnnnnnnnnnnnnnnnnnnnnnnnnnnnnnnnnnnnnnnnnnnnnnnnnnnnnnnnnnnnnnnnnnnnnnnnnnnnnnnnnnnnnnnnnnnnnnnnnnnnnnnnnnnnnnnnnnnnnnnnnnnnnnnnnnnnnnnnnnnnnnnnnnnnnnnnnnnnnnnnnnnnnnnnnnnnnnnnnnnnnnnnnnnnnnnnnnnnnnnnnnnnnnnnnnnnnnnnnnnnnnnnnnnnnnnnnnnnnnnnnnnnnnnnnnnnnnnnnnnnnnnnnnnnnnnnnnnnnnnnnnnnnnnnnnnnnnnnnnnnnnnnnnnnnnnnnnnnnnnnnnnnnnnnnnnnnnnnnnnnnnnnnnnnnnnnnnnnnnnnnnnnnnnnnnnnnnnnnnnnnnnnnnnnnnnnnnnnnnnnnnnnnnnnnnnnnnnnnnnnnnnnnnnnnnnnnnnnnnnnnnnnnnnnnnnnnnnnnnnnnnnnnnnnnnnnnnnnnnnnnnnnnnnnnnnnnnnnnnnnnnnnnnnnnnnnnnnnnnnnnnnnnnnnnnnnnnnnnnnnnnnnnnnnnnnnnnnnnnnnnnnnnnnnnnnnnnnnnnnnnnnnnnnnnnnnnnnnnnnnnnnnnnnnnnnnnnnnnnnnnnnnnnnnnnnnnnnnnnnnnnnnnnnnnnnnnnnnnnnnnnnnnnnnnnnnnnnnnnnnnnnnnnnnnnnnnnnnnnnnnnnnnnnnnnnnnnnnnnnnnnnnnnnnnnnnnnnnnnnnnnnnnnnnnnnnnnnnnnnnnnnnnnnnnnnnnnnnnnnnnnnnnnnnnnnnnnnnnnnnnnnnnnnnnnnnnnnnnnnnnnnnnnnnnnnnnnnnnnnnnnnnnnnnnnnnnnnnnnnnnnnnnnnnnnnnnnnnnnnnnnnnnnnnnnnnnnnnnnnnnnnnnnnnnnnnnnnnnnnnnnnnnnnnnnnnnnnnnnnnnnnnnnnnnnnnnnnnnnnnnnnnnnnnnnnnnnnnnnnnnnnnnnnnnnnnnnnnnnnnnnnnnnnnnnnnnnnnnnnnnnnnnnnnnnnnnnnnnnnnnnnnnnnnnnnnnnnnnnnnnnnnnnnnnnnnnnnnnnnnnnnnnnnnnnnnnnnnnnnnnnnnnnnnnnnnnnnnnnnnnnnnnnnnnnnnnnnnnnnnnnnnnnnnnnnnnnnnnnnnnnnnnnnnnnnnnnnnnnnnnnnnnnnnnnnnnnnnnnnnnnnnnnnnnnnnnnnnnnnnnnnnnnnnnnnnnnnnnnnnnnnnnnnnnnnnnnnnnnnnnnnnnnnnnnnnnnnnnnnnnnnnnnnnnnnnnnnnnnnnnnnnnnnnnnnnnnnnnnnnnnnnnnnnnnnnnnnnnnnnnnnnnnnnnnnnnnnnnnnnnnnnnnnnnnnnnnnnnnnnnnnnnnnnnnnnnnnnnnnnnnnnnnnnnnnnnnnnnnnnnnnnnnnnnnnnnnnnnnnnnnnnnnnnnnnnnnnnnnnnnnnnnnnnnnnnnnnnnnnnnnnnnnnnnnnnnnnnnnnnnnnnnnnnnnnnnnnnnnnnnnnnnnnnnnnnnnnnnnnnnnnnnnnnnnnnnnnnnnnnnnnnnnnnnnnnnnnnnnnnnnnnnnnnnnnnnnnnnnnnnnnnnnnnnnnnnnnnnnnnnnnnnnnnnnnnnnnnnnnnnnnnnnnnnnnnnnnnnnnnnnnnnnnnnnnnnnnnnnnnnnnnnnnnnnnnnnnnnnnnnnnnnnnnnnnnnnnnnnnnnnnnnnnnnnnnnnnnnnnnnnnnnnnnnnnnnnnnnnnnnnnnnnnnnnnnnnnnnnnnnnnnnnnnnnnnnnnnnnnnnnnnnnnnnnnnnnnnnnnnnnnnnnnnnnnnnnnnnnnnnnnnnnnnnnnnnnnnnnnnnnnnnnnnnnnnnnnnnnnnnnnnnnnnnnnnnnnnnnnnnnnnnnnnnnnnnnnnnnnnnnnnnnnnnnnnnnnnnnnnnnnnnnnnnnnnnnnnnnnnnnnnnnnnnnnnnnnnnnnnnnnnnnnnnnnnnnnnnnnnnnnnnnnnnnnnnnnnnnnnnnnnnnnnnnnnnnnnnnnnnnnnnnnnnnnnnnnnnnnnnnnnnnnnnnnnnnnnnnnnnnnnnnnnnnnnnnnnnnnnnnnnnnnnnnnnnnnnnnnnnnnnnnnnnnnnnnnnnnnnnnnnnnnnnnnnnnnnnnnnnnnnnnnnnnnnnnnnnnnnnnnnnnnnnnnnnnnnnnnnnnnnnnnnnnnnnnnnnnnnnnnnnnnnnnnnnnnnnnnnnnnnnnnnnnnnnnnnnnnnnnnnnnnnnnnnnnnnnnnnnnnnnnnnnnnnnnnnnnnnnnnnnnnnnnnnnnnnnnnnnnnnnnnnnnnnnnnnnnnnnnnnnnnnnnnnnnnnnnnnnnnnnnnnnnnnnnnnnnnnnnnnnnnnnnnnnnnnnnnnnnnnnnnnnnnnnnnnnnnnnnnnnnnnnnnnnnnnnnnnnnnnnnnnnnnnnnnnnnnnnnnnnnnnnnnnnnnnnnnnnnnnnnnnnnnnnnnnnnnnnnnnnnnnnnnnnnnnnnnnnnnnnnnnnnnnnnnnnnnnnnnnnnnnnnnnnnnnnnnnnnnnnnnnnnnnnnnnnnnnnnnnnnnnnnnnnnnnnnnnnnnnnnnnnnnnnnnnnnnnnnnnnnnnnnnnnnnnnnnnnnnnnnnnnnnnnnnnnnnnnnnnnnnnnnnnnnnnnnnnnnnnnnnnnnnnnnnnnnnnnnnnnnnnnnnnnnnnnnnnnnnnnnnnnnnnnnnnnnnnnnnnnnnnnnnnnnnnnnnnnnnnnnnnnnnnnnnnnnnnnnnnnnnnnnnnnnnnnnnnnnnnnnnnnnnnnnnnnnnnnnnnnnnnnnnnnnnnnnnnnnnnnnnnnnnnnnnnnnnnnnnnnnnnnnnnnnnnnnnnnnnnnnnnnnnnnnnnnnnnnnnnnnnnnnnnnnnnnnnnnnnnnnnnnnnnnnnnnnnnnnnnnnnnnnnnnnnnnnnnnnnnnnnnnnnnnnnnnnnnnnnnnnnnnnnnnnnnnnnnnnnnnnnnnnnnnnnnnnnnnnnnnnnnnnnnnnnnnnnnnnnnnnnnnnnnnnnnnnnnnnnnnnnnnnnnnnnnnnnnnnnnnnnnnnnnnnnnnnnnnnnnnnnnnnnnnnnnnnnnnnnnnnnnnnnnnnnnnnnnnnnnnnnnnnnnnnnnnnnnnnnnnnnnnnnnnnnnnnnnnnnnnnnnnnnnnnnnnnnnnnnnnnnnnnnnnnnnnnnnnnnnnnnnnnnnnnnnnnnnnnnnnnnnnnnnnnnnnnnnnnnnnnnnnnnnnnnnnnnnnnnnnnnnnnnnnnnnnnnnnnnnnnnnnnnnnnnnnnnnnnnnnnnnnnnnnnnnnnnnnnnnnnnnnnnnnnnnnnnnnnnnnnnnnnnnnnnnnnnnnnnnnnnnnnnnnnnnnnnnnnnnnnnnnnnnnnnnnnnnnnnnnnnnnnnnnnnnnnnnnnnnnnnnnnnnnnnnnnnnnnnnnnnnnnnnnnnnnnnnnnnnnnnnnnnnnnnnnnnnnnnnnnnnnnnnnnnnnnnnnnnnnnnnnnnnnnnnnnnnnnnnnnnnnnnnnnnnnnnnnnnnnnnnnnnnnnnnnnnnnnnnnnnnnnnnnnnnnnnnnnnnnnnnnnnnnnnnnnnnnnnnnnnnnnnnnnnnnnnnnnnnnnnnnnnnnnnnnnnnnnnnnnnnnnnnnnnnnnnnnnnnnnnnnnnnnnnnnnnnnnnnnnnnnnnnnnnnnnnnnnnnnnnnnnnnnnnnnnnnnnnnnnnnnnnnnnnnnnnnnnnnnnnnnnnnnnnnnnnnnnnnnnnnnnnnnnnnnnnnnnnnnnnnnnnnnnnnnnnnnnnnnnnnnnnnnnnnnnnnnnnnnnnnnnnnnnnnnnnnnnnnnnnnnnnnnnnnnnnnnnnnnnnnnnnnnnnnnnnnnnnnnnnnnnnnnnnnnnnnnnnnnnnnnnnnnnnnnnnnnnnnnnnnnnnnnnnnnnnnnnnnnnnnnnnnnnnnnnnnnnnnnnnnnnnnnnnnnnnnnnnnnnnnnnnnnnnnnnnnnnnnnnnnnnnnnnnnnnnnnnnnnnnnnnnnnnnnnnnnnnnnnnnnnnnnnnnnnnnnnnnnnnnnnnnnnnnnnnnnnnnnnnnnnnnnnnnnnnnnnnnnnnnnnnnnnnnnnnnnnnnnnnnnnnnnnnnnnnnnnnnnnnnnnnnnnnnnnnnnnnnnnnnnnnnnnnnnnnnnnnnnnnnnnnnnnnnnnnnnnnnnnnnnnnnnnnnnnnnnnnnnnnnnnnnnnnnnnnnnnnnnnnnnnnnnnnnnnnnnnnnnnnnnnnnnnnnnnnnnnnnnnnnnnnnnnnnnnnnnnnnnnnnnnnnnnnnnnnnnnnnnnnnnnnnnnnnnnnnnnnnnnnnnnnnnnnnnnnnnnnnnnnnnnnnnnnnnnnnnnnnnnnnnnnnnnnnnnnnnnnnnnnnnnnnnnnnnnnnnnnnnnnnnnnnnnnnnnnnnnnnnnnnnnnnnnnnnnnnnnnnnnnnnnnnnnnnnnnnnnnnnnnnnnnnnnnnnnnnnnnnnnnnnnnnnnnnnnnnnnnnnnnnnnnnnnnnnnnnnnnnnnnnnnnnnnnnnnnnnnnnnnnnnnnnnnnnnnnnnnnnnnnnnnnnnnnnnnnnnnnnnnnnnnnnnnnnnnnnnnnnnnnnnnnnnnnnnnnnnnnnnnnnnnnnnnnnnnnnnnnnnnnnnnnnnnnnnnnnnnnnnnnnnnnnnnnnnnnnnnnnnnnnnnnnnnnnnnnnnnnnnnnnnnnnnnnnnnnnnnnnnnnnnnnnnnnnnnnnnnnnnnnnnnnnnnnnnnnnnnnnnnnnnnnnnnnnnnnnnnnnnnnnnnnnnnnnnnnnnnnnnnnnnnnnnnnnnnnnnnnnnnnnnnnnnnnnnnnnnnnnnnnnnnnnnnnnnnnnnnnnnnnnnnnnnnnnnnnnnnnnnnnnnnnnnnnnnnnnnnnnnnnnnnnnnnnnnnnnnnnnnnnnnnnnnnnnnnnnnnnnnnnnnnnnnnnnnnnnnnnnnnnnnnnnnnnnnnnnnnnnnnnnnnnnnnnnnnnnnnnnnnnnnnnnnnnnnnnnnnnnnnnnnnnnnnnnnnnnnnnnnnnnnnnnnnnnnnnnnnnnnnnnnnnnnnnnnnnnnnnnnnnnnnnnnnnnnnnnnnnnnnnnnnnnnnnnnnnnnnnnnnnnnnnnnnnnnnnnnnnnnnnnnnnnnnnnnnnnnnnnnnnnnnnnnnnnnnnnnnnnnnnnnnnnnnnnnnnnnnnnnnnnnnnnnnnnnnnnnnnnnnnnnnnnnnnnnnnnnnnnnnnnnnnnnnnnnnnnnnnnnnnnnnnnnnnnnnnnnnnnnnnnnnnnnnnnnnnnnnnnnnnnnnnnnnnnnnnnnnnnnnnnnnnnnnnnnnnnnnnnnnnnnnnnnnnnnnnnnnnnnnnnnnnnnnnnnnnnnnnnnnnnnnnnnnnnnnnnnnnnnnnnnnnnnnnnnnnnnnnnnnnnnnnnnnnnnnnnnnnnnnnnnnnnnnnnnnnnnnnnnnnnnnnnnnnnnnnnnnnnnnnnnnnnnnnnnnnnnnnnnnnnnnnnnnnnnnnnnnnnnnnnnnnnnnnnnnnnnnnnnnnnnnnnnnnnnnnnnnnnnnnnnnnnnnnnnnnnnnnnnnnnnnnnnnnnnnnnnnnnnnnnnnnnnnnnnnnnnnnnnnnnnnnnnnnnnnnnnnnnnnnnnnnnnnnnnnnnnnnnnnnnnnnnnnnnnnnnnnnnnnnnnnnnnnnnnnnnnnnnnnnnnnnnnnnnnnnnnnnnnnnnnnnnnnnnnnnnnnnnnnnnnnnnnnnnnnnnnnnnnnnnnnnnnnnnnnnnnnnnnnnnnnnnnnnnnnnnnnnnnnnnnnnnnnnnnnnnnnnnnnnnnnnnnnnnnnnnnnnnnnnnnnnnnnnnnnnnnnnnnnnnnnnnnnnnnnnnnnnnnnnnnnnnnnnnnnnnnnnnnnnnnnnnnnnnnnnnnnnnnnnnnnnnnnnnnnnnnnnnnnnnnnnnnnnnnnnnnnnnnnnnnnnnnnnnnnnnnnnnnnnnnnnnnnnnnnnnnnnnnnnnnnnnnnnnnnnnnnnnnnnnnnnnnnnnnnnnnnnnnnnnnnnnnnnnnnnnnnnnnnnnnnnnnnnnnnnnnnnnnnnnnnnnnnnnnnnnnnnnnnnnnnnnnnnnnnnnnnnnnnnnnnnnnnnnnnnnnnnnnnnnnnnnnnnnnnnnnnnnnnnnnnnnnnnnnnnnnnnnnnnnnnnnnnnnnnnnnnnnnnnnnnnnnnnnnnnnnnnnnnnnnnnnnnnnnnnnnnnnnnnnnnnnnnnnnnnnnnnnnnnnnnnnnnnnnnnnnnnnnnnnnnnnnnnnnnnnnnnnnnnnnnnnnnnnnnnnnnnnnnnnnnnnnnnnnnnnnnnnnnnnnnnnnnnnnnnnnnnnnnnnnnnnnnnnnnnnnnnnnnnnnnnnnnnnnnnnnnnnnnnnnnnnnnnnnnnnnnnnnnnnnnnnnnnnnnnnnnnnnnnnnnnnnnnnnnnnnnnnnnnnnnnnnnnnnnnnnnnnnnnnnnnnnnnnnnnnnnnnnnnnnnnnnnnnnnnnnnnnnnnnnnnnnnnnnnnnnnnnnnnnnnnnnnnnnnnnnnnnnnnnnnnnnnnnnnnnnnnnnnnnnnnnnnnnnnnnnnnnnnnnnnnnnnnnnnnnnnnnnnnnnnnnnnnnnnnnnnnnnnnnnnnnnnnnnnnnnnnnnnnnnnnnnnnnnnnnnnnnnnnnnnnnnnnnnnnnnnnnnnnnnnnnnnnnnnnnnnnnnnnnnnnnnnnnnnnnnnnnnnnnnnnnnnnnnnnnnnnnnnnnnnnnnnnnnnnnnnnnnnnnnnnnnnnnnnnnnnnnnnnnnnnnnnnnnnnnnnnnnnnnnnnnnnnnnnnnnnnnnnnnnnnnnnnnnnnnnnnnnnnnnnnnnnnnnnnnnnnnnnnnnnnnnnnnnnnnnnnnnnnnnnnnnnnnnnnnnnnnnnnnnnnnnnnnnnnnnnnnnnnnnnnnnnnnnnnnnnnnnnnnnnnnnnnnnnnnnnnnnnnnnnnnnnnnnnnnnnnnnnnnnnnnnnnnnnnnnnnnnnnnnnnnnnnnnnnnnnnnnnnnnnnnnnnnnnnnnnnnnnnnnnnnnnnnnnnnnnnnnnnnnnnnnnnnnnnnnnnnnnnnnnnnnnnnnnnnnnnnnnnnnnnnnnnnnnnnnnnnnnnnnnnnnnnnnnnnnnnnnnnnnnnnnnnnnnnnnnnnnnnnnnnnnnnnnnnnnnnnnnnnnnnnnnnnnnnnnnnnnnnnnnnnnnnnnnnnnnnnnnnnnnnnnnnnnnnnnnnnnnnnnnnnnnnnnnnnnnnnnnnnnnnnnnnnnnnnnnnnnnnnnnnnnnnnnnnnnnnnnnnnnnnnnnnnnnnnnnnnnnnnnnnnnnnnnnnnnnnnnnnnnnnnnnnnnnnnnnnnnnnnnnnnnnnnnnnnnnnnnnnnnnnnnnnnnnnnnnnnnnnnnnnnnnnnnnnnnnnnnnnnnnnnnnnnnnnnnnnnnnnnnnnnnnnnnnnnnnnnnnnnnnnnnnnnnnnnnnnnnnnnnnnnnnnnnnnnnnnnnnnnnnnnnnnnnnnnnnnnnnnnnnnnnnnnnnnnnnnnnnnnnnnnnnnnnnnnnnnnnnnnnnnnnnnnnnnnnnnnnnnnnnnnnnnnnnnnnnnnnnnnnnnnnnnnnnnnnnnnnnnnnnnnnnnnnnnnnnnnnnnnnnnnnnnnnnnnnnnnnnnnnnnnnnnnnnnnnnnnnnnnnnnnnnnnnnnnnnnnnnnnnnnnnnnnnnnnnnnnnnnnnnnnnnnnnnnnnnnnnnnnnnnnnnnnnnnnnnnnnnnnnnnnnnnnnnnnnnnnnnnnnnnnnnnnnnnnnnnnnnnnnnnnnnnnnnnnnnnnnnnnnnnnnnnnnnnnnnnnnnnnnnnnnnnnnnnnnnnnnnnnnnnnnnnnnnnnnnnnnnnnnnnnnnnnnnnnnnnnnnnnnnnnnnnnnnnnnnnnnnnnnnnnnnnnnnnnnnnnnnnnnnnnnnnnnnnnnnnnnnnnnnnnnnnnnnnnnnnnnnnnnnnnnnnnnnnnnnnnnnnnnnnnnnnnnnnnnnnnnnnnnnnnnnnnnnnnnnnnnnnnnnnnnnnnnnnnnnnnnnnnnnnnnnnnnnnnnnnnnnnnnnnnnnnnnnnnnnnnnnnnnnnnnnnnnnnnnnnnnnnnnnnnnnnnnnnnnnnnnnnnnnnnnnnnnnnnnnnnnnnnnnnnnnnnnnnnnnnnnnnnnnnnnnnnnnnnnnnnnnnnnnnnnnnnnnnnnnnnnnnnnnnnnnnnnnnnnnnnnnnnnnnnnnnnnnnnnnnnnnnnnnnnnnnnnnnnnnnnnnnnnnnnnnnnnnnnnnnnnnnnnnnnnnnnnnnnnnnnnnnnnnnnnnnnnnnnnnnnnnnnnnnnnnnnnnnnnnnnnnnnnnnnnnnnnnnnnnnnnnnnnnnnnnnnnnnnnnnnnnnnnnnnnnnnnnnnnnnnnnnnnnnnnnnnnnnnnnnnnnnnnnnnnnnnnnnnnnnnnnnnnnnnnnnnnnnnnnnnnnnnnnnnnnnnnnnnnnnnnnnnnnnnnnnnnnnnnnnnnnnnnnnnnnnnnnnnnnnnnnnnnnnnnnnnnnnnnnnnnnnnnnnnnnnnnnnnnnnnnnnnnnnnnnnnnnnnnnnnnnnnnnnnnnnnnnnnnnnnnnnnnnnnnnnnnnnnnnnnnnnnnnnnnnnnnnnnnnnnnnnnnnnnnnnnnnnnnnnnnnnnnnnnnnnnnnnnnnnnnnnnnnnnnnnnnnnnnnnnnnnnnnnnnnnnnnnnnnnnnnnnnnnnnnnnnnnnnnnnnnnnnnnnnnnnnnnnnnnnnnnnnnnnnnnnnnnnnnnnnnnnnnnnnnnnnnnnnnnnnnnnnnnnnnnnnnnnnnnnnnnnnnnnnnnnnnnnnnnnnnnnnnnnnnnnnnnnnnnnnnnnnnnnnnnnnnnnnnnnnnnnnnnnnnnnnnnnnnnnnnnnnnnnnnnnnnnnnnnnnnnnnnnnnnnnnnnnnnnnnnnnnnnnnnnnnnnnnnnnnnnnnnnnnnnnnnnnnnnnnnnnnnnnnnnnnnnnnnnnnnnnnnnnnnnnnnnnnnnnnnnnnnnnnnnnnnnnnnnnnnnnnnnnnnnnnnnnnnnnnnnnnnnnnnnnnnnnnnnnnnnnnnnnnnnnnnnnnnnnnnnnnnnnnnnnnnnnnnnnnnnnnnnnnnnnnnnnnnnnnnnnnnnnnnnnnnnnnnnnnnnnnnnnnnnnnnnnnnnnnnnnnnnnnnnnnnnnnnnnnnnnnnnnnnnnnnnnnnnnnnnnnnnnnnnnnnnnnnnnnnnnnnnnnnnnnnnnnnnnnnnnnnnnnnnnnnnnnnnnnnnnnnnnnnnnnnnnnnnnnnnnnnnnnnnnnnnnnnnnnnnnnnnnnnnnnnnnnnnnnnnnnnnnnnnnnnnnnnnnnnnnnnnnnnnnnnnnnnnnnnnnnnnnnnnnnnnnnnnnnnnnnnnnnnnnnnnnnnnnnnnnnnnnnnnnnnnnnnnnnnnnnnnnnnnnnnnnnnnnnnnnnnnnnnnnnnnnnnnnnnnnnnnnnnnnnnnnnnnnnnnnnnnnnnnnnnnnnnnnnnnnnnnnnnnnnnnnnnnnnnnnnnnnnnnnnnnnnnnnnnnnnnnnnnnnnnnnnnnnnnnnnnnnnnnnnnnnnnnnnnnnnnnnnnnnnnnnnnnnnnnnnnnnnnnnnnnnnnnnnnnnnnnnnnnnnnnnnnnnnnnnnnnnnnnnnnnnnnnnnnnnnnnnnnnnnnnnnnnnnnnnnnnnnnnnnnnnnnnnnnnnnnnnnnnnnnnnnnnnnnnnnnnnnnnnnnnnnnnnnnnnnnnnnnnnnnnnnnnnnnnnnnnnnnnnnnnnnnnnnnnnnnnnnnnnnnnnnnnnnnnnnnnnnnnnnnnnnnnnnnnnnnnnnnnnnnnnnnnnnnnnnnnnnnnnnnnnnnnnnnnnnnnnnnnnnnnnnnnnnnnnnnnnnnnnnnnnnnnnnnnnnnnnnnnnnnnnnnnnnnnnnnnnnnnnnnnnnnnnnnnnnnnnnnnnnnnnnnnnnnnnnnnnnnnnnnnnnnnnnnnnnnnnnnnnnnnnnnnnnnnnnnnnnnnnnnnnnnnnnnnnnnnnnnnnnnnnnnnnnnnnnnnnnnnnnnnnnnnnnnnnnnnnnnnnnnnnnnnnnnnnnnnnnnnnnnnnnnnnnnnnnnnnnnnnnnnnnnnnnnnnnnnnnnnnnnnnnnnnnnnnnnnnnnnnnnnnnnnnnnnnnnnnnnnnnnnnnnnnnnnnnnnnnnnnnnnnnnnnnnnnnnnnnnnnnnnnnnnnnnnnnnnnnnnnnnnnnnnnnnnnnnnnnnnnnnnnnnnnnnnnnnnnnnnnnnnnnnnnnnnnnnnnnnnnnnnnnnnnnnnnnnnnnnnnnnnnnnnnnnnnnnnnnnnnnnnnnnnnnnnnnnnnnnnnnnnnnnnnnnnnnnnnnnnnnnnnnnnnnnnnnnnnnnnnnnnnnnnnnnnnnnnnnnnnnnnnnnnnnnnnnnnnnnnnnnnnnnnnnnnnnnnnnnnnnnnnnnnnnnnnnnnnnnnnnnnnnnnnnnnnnnnnnnnnnnnnnnnnnnnnnnnnnnnnnnnnnnnnnnnnnnnnnnnnnnnnnnnnnnnnnnnnnnnnnnnnnnnnnnnnnnnnnnnnnnnnnnnnnnnnnnnnnnnnnnnnnnnnnnnnnnnnnnnnnnnnnnnnnnnnnnnnnnnnnnnnnnnnnnnnnnnnnnnnnnnnnnnnnnnnnnnnnnnnnnnnnnnnnnnnnnnnnnnnnnnnnnnnnnnnnnnnnnnnnnnnnnnnnnnnnnnnnnnnnnnnnnnnnnnnnnnnnnnnnnnnnnnnnnnnnnnnnnnnnnnnnnnnnnnnnnnnnnnnnnnnnnnnnnnnnnnnnnnnnnnnnnnnnnnnnnnnnnnnnnnnnnnnnnnnnnnnnnnnnnnnnnnnnnnnnnnnnnnnnnnnnnnnnnnnnnnnnnnnnnnnnnnnnnnnnnnnnnnnnnnnnnnnnnnnnnnnnnnnnnnnnnnnnnnnnnnnnnnnnnnnnnnnnnnnnnnnnnnnnnnnnnnnnnnnnnnnnnnnnnnnnnnnnnnnnnnnnnnnnnnnnnnnnnnnnnnnnnnnnnnnnnnnnnnnnnnnnnnnnnnnnnnnnnnnnnnnnnnnnnnnnnnnnnnnnnnnnnnnnnnnnnnnnnnnnnnnnnnnnnnnnnnnnnnnnnnnnnnnnnnnnnnnnnnnnnnnnnnnnnnnnnnnnnnnnnnnnnnnnnnnnnnnnnnnnnnnnnnnnnnnnnnnnnnnnnnnnnnnnnnnnnnnnnnnnnnnnnnnnnnnnnnnnnnnnnnnnnnnnnnnnnnnnnnnnnnnnnnnnnnnnnnnnnnnnnnnnnnnnnnnnnnnnnnnnnnnnnnnnnnnnnnnnnnnnnnnnnnnnnnnnnnnnnnnnnnnnnnnnnnnnnnnnnnnnnnnnnnnnnnnnnnnnnnnnnnnnnnnnnnnnnnnnnnnnnnnnnnnnnnnnnnnnnnnnnnnnnnnnnnnnnnnnnnnnnnnnnnnnnnnnnnnnnnnnnnnnnnnnnnnnnnnnnnnnnnnnnnnnnnnnnnnnnnnnnnnnnnnnnnnnnnnnnnnnnnnnnnnnnnnnnnnnnnnnnnnnnnnnnnnnnnnnnnnnnnnnnnnnnnnnnnnnnnnnnnnnnnnnnnnnnnnnnnnnnnnnnnnnnnnnnnnnnnnnnnnnnnnnnnnnnnnnnnnnnnnnnnnnnnnnnnnnnnnnnnnnnnnnnnnnnnnnnnnnnnnnnnnnnnnnnnnnnnnnnnnnnnnnnnnnnnnnnnnnnnnnnnnnnnnnnnnnnnnnnnnnnnnnnnnnnnnnnnnnnnnnnnnnnnnnnnnnnnnnnnnnnnnnnnnnnnnnnnnnnnnnnnnnnnnnnnnnnnnnnnnnnnnnnnnnnnnnnnnnnnnnnnnnnnnnnnnnnnnnnnnnnnnnnnnnnnnnnnnnnnnnnnnnnnnnnnnnnnnnnnnnnnnnnnnnnnnnnnnnnnnnnnnnnnnnnnnnnnnnnnnnnnnnnnnnnnnnnnnnnnnnnnnnnnnnnnnnnnnnnnnnnnnnnnnnnnnnnnnnnnnnnnnnnnnnnnnnnnnnnnnnnnnnnnnnnnnnnnnnnnnnnnnnnnnnnnnnnnnnnnnnnnnnnnnnnnnnnnnnnnnnnnnnnnnnnnnnnnnnnnnnnnnnnnnnnnnnnnnnnnnnnnnnnnnnnnnnnnnnnnnnnnnnnnnnnnnnnnnnnnnnnnnnnnnnnnnnnnnnnnnnnnnnnnnnnnnnnnnnnnnnnnnnnnnnnnnnnnnnnnnnnnnnnnnnnnnnnnnnnnnnnnnnnnnnnnnnnnnnnnnnnnnnnnnnnnnnnnnnnnnnnnnnnnnnnnnnnnnnnnnnnnnnnnnnnnnnnnnnnnnnnnnnnnnnnnnnnnnnnnnnnnnnnnnnnnnnnnnnnnnnnnnnnnnnnnnnnnnnnnnnnnnnnnnnnnnnnnnnnnnnnnnnnnnnnnnnnnnnnnnnnnnnnnnnnnnnnnnnnnnnnnnnnnnnnnnnnnnnnnnnnnnnnnnnnnnnnnnnnnnnnnnnnnnnnnnnnnnnnnnnnnnnnnnnnnnnnnnnnnnnnnnnnnnnnnnnnnnnnnnnnnnnnnnnnnnnnnnnnnnnnnnnnnnnnnnnnnnnnnnnnnnnnnnnnnnnnnnnnnnnnnnnnnnnnnnnnnnnnnnnnnnnnnnnnnnnnnnnnnnnnnnnnnnnnnnnnnnnnnnnnnnnnnnnnnnnnnnnnnnnnnnnnnnnnnnnnnnnnnnnnnnnnnnnnnnnnnnnnnnnnnnnnnnnnnnnnnnnnnnnnnnnnnnnnnnnnnnnnnnnnnnnnnnnnnnnnnnnnnnnnnnnnnnnnnnnnnnnnnnnnnnnnnnnnnnnnnnnnnnnnnnnnnnnnnnnnnnnnnnnnnnnnnnnnnnnnnnnnnnnnnnnnnnnnnnnnnnnnnnnnnnnnnnnnnnnnnnnnnnnnnnnnnnnnnnnnnnnnnnnnnnnnnnnnnnnnnnnnnnnnnnnnnnnnnnnnnnnnnnnnnnnnnnnnnnnnnnnnnnnnnnnnnnnnnnnnnnnnnnnnnnnnnnnnnnnnnnnnnnnnnnnnnnnnnnnnnnnnnnnnnnnnnnnnnnnnnnnnnnnnnnnnnnnnnnnnnnnnnnnnnnnnnnnnnnnnnnnnnnnnnnnnnnnnnnnnnnnnnnnnnnnnnnnnnnnnnnnnnnnnnnnnnnnnnnnnnnnnnnnnnnnnnnnnnnnnnnnnnnnnnnnnnnnnnnnnnnnnnnnnnnnnnnnnnnnnnnnnnnnnnnnnnnnnnnnnnnnnnnnnnnnnnnnnnnnnnnnnnnnnnnnnnnnnnnnnnnnnnnnnnnnnnnnnnnnnnnnnnnnnnnnnnnnnnnnnnnnnnnnnnnnnnnnnnnnnnnnnnnnnnnnnnnnnnnnnnnnnnnnnnnnnnnnnnnnnnnnnnnnnnnnnnnnnnnnnnnnnnnnnnnnnnnnnnnnnnnnnnnnnnnnnnnnnnnnnnnnnnnnnnnnnnnnnnnnnnnnnnnnnnnnnnnnnnnnnnnnnnnnnnnnnnnnnnnnnnnnnnnnnnnnnnnnnnnnnnnnnnnnnnnnnnnnnnnnnnnnnnnnnnnnnnnnnnnnnnnnnnnnnnnnnnnnnnnnnnnnnnnnnnnnnnnnnnnnnnnnnnnnnnnnnnnnnnnnnnnnnnnnnnnnnnnnnnnnnnnnnnnnnnnnnnnnnnnnnnnnnnnnnnnnnnnnnnnnnnnnnnnnnnnnnnnnnnnnnnnnnnnnnnnnnnnnnnnnnnnnnnnnnnnnnnnnnnnnnnnnnnnnnnnnnnnnnnnnnnnnnnnnnnnnnnnnnnnnnnnnnnnnnnnnnnnnnnnnnnnnnnnnnnnnnnnnnnnnnnnnnnnnnnnnnnnnnnnnnnnnnnnnnnnnnnnnnnnnnnnnnnnnnnnnnnnnnnnnnnnnnnnnnnnnnnnnnnnnnnnnnnnnnnnnnnnnnnnnnnnnnnnnnnnnnnnnnnnnnnnnnnnnnnnnnnnnnnnnnnnnnnnnnnnnnnnnnnnnnnnnnnnnnnnnnnnnnnnnnnnnnnnnnnnnnnnnnnnnnnnnnnnnnnnnnnnnnnnnnnnnnnnnnnnnnnnnnnnnnnnnnnnnnnnnnnnnnnnnnnnnnnnnnnnnnnnnnnnnnnnnnnnnnnnnnnnnnnnnnnnnnnnnnnnnnnnnnnnnnnnnnnnnnnnnnnnnnnnnnnnnnnnnnnnnnnnnnnnnnnnnnnnnnnnnnnnnnnnnnnnnnnnnnnnnnnnnnnnnnnnnnnnnnnnnnnnnnnnnnnnnnnnnnnnnnnnnnnnnnnnnnnnnnnnnnnnnnnnnnnnnnnnnnnnnnnnnnnnnnnnnnnnnnnnnnnnnnnnnnnnnnnnnnnnnnnnnnnnnnnnnnnnnnnnnnnnnnnnnnnnnnnnnnnnnnnnnnnnnnnnnnnnnnnnnnnnnnnnnnnnnnnnnnnnnnnnnnnnnnnnnnnnnnnnnnnnnnnnnnnnnnnnnnnnnnnnnnnnnnnnnnnnnnnnnnnnnnnnnnnnnnnnnnnnnnnnnnnnnnnnnnnnnnnnnnnnnnnnnnnnnnnnnnnnnnnnnnnnnnnnnnnnnnnnnnnnnnnnnnnnnnnnnnnnnnnnnnnnnnnnnnnnnnnnnnnnnnnnnnnnnnnnnnnnnnnnnnnnnnnnnnnnnnnnnnnnnnnnnnnnnnnnnnnnnnnnnnnnnnnnnnnnnnnnnnnnnnnnnnnnnnnnnnnnnnnnnnnnnnnnnnnnnnnnnnnnnnnnnnnnnnnnnnnnnnnnnnnnnnnnnnnnnnnnnnnnnnnnnnnnnnnnnnnnnnnnnnnnnnnnnnnnnnnnnnnnnnnnnnnnnnnnnnnnnnnnnnnnnnnnnnnnnnnnnnnnnnnnnnnnnnnnnnnnnnnnnnnnnnnnnnnnnnnnnnnnnnnnnnnnnnnnnnnnnnnnnnnnnnnnnnnnnnnnnnnnnnnnnnnnnnnnnnnnnnnnnnnnnnnnnnnnnnnnnnnnnnnnnnnnnnnnnnnnnnnnnnnnnnnnnnnnnnnnnnnnnnnnnnnnnnnnnnnnnnnnnnnnnnnnnnnnnnnnnnnnnnnnnnnnnnnnnnnnnnnnnnnnnnnnnnnnnnnnnnnnnnnnnnnnnnnnnnnnnnnnnnnnnnnnnnnnnnnnnnnnnnnnnnnnnnnnnnnnnnnnnnnnnnnnnnnnnnnnnnnnnnnnnnnnnnnnnnnnnnnnnnnnnnnnnnnnnnnnnnnnnnnnnnnnnnnnnnnnnnnnnnnnnnnnnnnnnnnnnnnnnnnnnnnnnnnnnnnnnnnnnnnnnnnnnnnnnnnnnnnnnnnnnnnnnnnnnnnnnnnnnnnnnnnnnnnnnnnnnnnnnnnnnnnnnnnnnnnnnnnnnnnnnnnnnnnnnnnnnnnnnnnnnnnnnnnnnnnnnnnnnnnnnnnnnnnnnnnnnnnnnnnnnnnnnnnnnnnnnnnnnnnnnnnnnnnnnnnnnnnnnnnnnnnnnnnnnnnnnnnnnnnnnnnnnnnnnnnnnnnnnnnnnnnnnnnnnnnnnnnnnnnnnnnnnnnnnnnnnnnnnnnnnnnnnnnnnnnnnnnnnnnnnnnnnnnnnnnnnnnnnnnnnnnnnnnnnnnnnnnnnnnnnnnnnnnnnnnnnnnnnnnnnnnnnnnnnnnnnnnnnnnnnnnnnnnnnnnnnnnnnnnnnnnnnnnnnnnnnnnnnnnnnnnnnnnnnnnnnnnnnnnnnnnnnnnnnnnnnnnnnnnnnnnnnnnnnnnnnnnnnnnnnnnnnnnnnnnnnnnnnnnnnnnnnnnnnnnnnnnnnnnnnnnnnnnnnnnnnnnnnnnnnnnnnnnnnnnnnnnnnnnnnnnnnnnnnnnnnnnnnnnnnnnnnnnnnnnnnnnnnnnnnnnnnnnnnnnnnnnnnnnnnnnnnnnnnnnnnnnnnnnnnnnnnnnnnnnnnnnnnnnnnnnnnnnnnnnnnnnnnnnnnnnnnnnnnnnnnnnnnnnnnnnnnnnnnnnnnnnnnnnnnnnnnnnnnnnnnnnnnnnnnnnnnnnnnnnnnnnnnnnnnnnnnnnnnnnnnnnnnnnnnnnnnnnnnnnnnnnnnnnnnnnnnnnnnnnnnnnnnnnnnnnnnnnnnnnnnnnnnnnnnnnnnnnnnnnnnnnnnnnnnnnnnnnnnnnnnnnnnnnnnnnnnnnnnnnnnnnnnnnnnnnnnnnnnnnnnnnnnnnnnnnnnnnnnnnnnnnnnnnnnnnnnnnnnnnnnnnnnnnnnnnnnnnnnnnnnnnnnnnnnnnnnnnnnnnnnnnnnnnnnnnnnnnnnnnnnnnnnnnnnnnnnnnnnnnnnnnnnnnnnnnnnnnnnnnnnnnnnnnnnnnnnnnnnnnnnnnnnnnnnnnnnnnnnnnnnnnnnnnnnnnnnnnnnnnnnnnnnnnnnnnnnnnnnnnnnnnnnnnnnnnnnnnnnnnnnnnnnnnnnnnnnnnnnnnnnnnnnnnnnnnnnnnnnnnnnnnnnnnnnnnnnnnnnnnnnnnnnnnnnnnnnnnnnnnnnnnnnnnnnnnnnnnnnnnnnnnnnnnnnnnnnnnnnnnnnnnnnnnnnnnnnnnnnnnnnnnnnnnnnnnnnnnnnnnnnnnnnnnnnnnnnnnnnnnnnnnnnnnnnnnnnnnnnnnnnnnnnnnnnnnnnnnnnnnnnnnnnnnnnnnnnnnnnnnnnnnnnnnnnnnnnnnnnnnnnnnnnnnnnnnnnnnnnnnnnnnnnnnnnnnnnnnnnnnnnnnnnnnnnnnnnnnnnnnnnnnnnnnnnnnnnnnnnnnnnnnnnnnnnnnnnnnnnnnnnnnnnnnnnnnnnnnnnnnnnnnnnnnnnnnnnnnnnnnnnnnnnnnnnnnnnnnnnnnnnnnnnnnnnnnnnnnnnnnnnnnnnnnnnnnnnnnnnnnnnnnnnnnnnnnnnnnnnnnnnnnnnnnnnnnnnnnnnnnnnnnnnnnnnnnnnnnnnnnnnnnnnnnnnnnnnnnnnnnnnnnnnnnnnnnnnnnnnnnnnnnnnnnnnnnnnnnnnnnnnnnnnnnnnnnnnnnnnnnnnnnnnnnnnnnnnnnnnnnnnnnnnnnnnnnnnnnnnnnnnnnnnnnnnnnnnnnnnnnnnnnnnnnnnnnnnnnnnnnnnnnnnnnnnnnnnnnnnnnnnnnnnnnnnnnnnnnnnnnnnnnnnnnnnnnnnnnnnnnnnnnnnnnnnnnnnnnnnnnnnnnnnnnnnnnnnnnnnnnnnnnnnnnnnnnnnnnnnnnnnnnnnnnnnnnnnnnnnnnnnnnnnnnnnnnnnnnnnnnnnnnnnnnnnnnnnnnnnnnnnnnnnnnnnnnnnnnnnnnnnnnnnnnnnnnnnnnnnnnnnnnnnnnnnnnnnnnnnnnnnnnnnnnnnnnnnnnnnnnnnnnnnnnnnnnnnnnnnnnnnnnnnnnnnnnnnnnnnnnnnnnnnnnnnnnnnnnnnnnnnnnnnnnnnnnnnnnnnnnnnnnnnnnnnnnnnnnnnnnnnnnnnnnnnnnnnnnnnnnnnnnnnnnnnnnnnnnnnnnnnnnnnnnnnnnnnnnnnnnnnnnnnnnnnnnnnnnnnnnnnnnnnnnnnnnnnnnnnnnnnnnnnnnnnnnnnnnnnnnnnnnnnnnnnnnnnnnnnnnnnnnnnnnnnnnnnnnnnnnnnnnnnnnnnnnnnnnnnnnnnnnnnnnnnnnnnnnnnnnnnnnnnnnnnnnnnnnnnnnnnnnnnnnnnnnnnnnnnnnnnnnnnnnnnnnnnnnnnnnnnnnnnnnnnnnnnnnnnnnnnnnnnnnnnnnnnnnnnnnnnnnnnnnnnnnnnnnnnnnnnnnnnnnnnnnnnnnnnnnnnnnnnnnnnnnnnnnnnnnnnnnnnnnnnnnnnnnnnnnnnnnnnnnnnnnnnnnnnnnnnnnnnnnnnnnnnnnnnnnnnnnnnnnnnnnnnnnnnnnnnnnnnnnnnnnnnnnnnnnnnnnnnnnnnnnnnnnnnnnnnnnnnnnnnnnnnnnnnnnnnnnnnnnnnnnnnnnnnnnnnnnnnnnnnnnnnnnnnnnnnnnnnnnnnnnnnnnnnnnnnnnnnnnnnnnnnnnnnnnnnnnnnnnnnnnnnnnnnnnnnnnnnnnnnnnnnnnnnnnnnnnnnnnnnnnnnnnnnnnnnnnnnnnnnnnnnnnnnnnnnnnnnnnnnnnnnnnnnnnnnnnnnnnnnnnnnnnnnnnnnnnnnnnnnnnnnnnnnnnnnnnnnnnnnnnnnnnnnnnnnnnnnnnnnnnnnnnnnnnnnnnnnnnnnnnnnnnnnnnnnnnnnnnnnnnnnnnnnnnnnnnnnnnnnnnnnnnnnnnnnnnnnnnnnnnnnnnnnnnnnnnnnnnnnnnnnnnnnnnnnnnnnnnnnnnnnnnnnnnnnnnnnnnnnnnnnnnnnnnnnnnnnnnnnnnnnnnnnnnnnnnnnnnnnnnnnnnnnnnnnnnnnnnnnnnnnnnnnnnnnnnnnnnnnnnnnnnnnnnnnnnnnnnnnnnnnnnnnnnnnnnnnnnnnnnnnnnnnnnnnnnnnnnnnnnnnnnnnnnnnnnnnnnnnnnnnnnnnnnnnnnnnnnnnnnnnnnnnnnnnnnnnnnnnnnnnnnnnnnnnnnnnnnnnnnnnnnnnnnnnnnnnnnnnnnnnnnnnnnnnnnnnnnnnnnnnnnnnnnnnnnnnnnnnnnnnnnnnnnnnnnnnnnnnnnnnnnnnnnnnnnnnnnnnnnnnnnnnnnnnnnnnnnnnnnnnnnnnnnnnnnnnnnnnnnnnnnnnnnnnnnnnnnnnnnnnnnnnnnnnnnnnnnnnnnnnnnnnnnnnnnnnnnnnnnnnnnnnnnnnnnnnnnnnnnnnnnnnnnnnnnnnnnnnnnnnnnnnnnnnnnnnnnnnnnnnnnnnnnnnnnnnnnnnnnnnnnnnnnnnnnnnnnnnnnnnnnnnnnnnnnnnnnnnnnnnnnnnnnnnnnnnnnnnnnnnnnnnnnnnnnnnnnnnnnnnnnnnnnnnnnnnnnnnnnnnnnnnnnnnnnnnnnnnnnnnnnnnnnnnnnnnnnnnnnnnnnnnnnnnnnnnnnnnnnnnnnnnnnnnnnnnnnnnnnnnnnnnnnnnnnnnnnnnnnnnnnnnnnnnnnnnnnnnnnnnnnnnnnnnnnnnnnnnnnnnnnnnnnnnnnnnnnnnnnnnnnnnnnnnnnnnnnnnnnnnnnnnnnnnnnnnnnnnnnnnnnnnnnnnnnnnnnnnnnnnnnnnnnnnnnnnnnnnnnnnnnnnnnnnnnnnnnnnnnnnnnnnnnnnnnnnnnnnnnnnnnnnnnnnnnnnnnnnnnnnnnnnnnnnnnnnnnnnnnnnnnnnnnnnnnnnnnnnnnnnnnnnnnnnnnnnnnnnnnnnnnnnnnnnnnnnnnnnnnnnnnnnnnnnnnnnnnnnnnnnnnnnnnnnnnnnnnnnnnnnnnnnnnnnnnnnnnnnnnnnnnnnnnnnnnnnnnnnnnnnnnnnnnnnnnnnnnnnnnnnnnnnnnnnnnnnnnnnnnnnnnnnnnnnnnnnnnnnnnnnnnnnnnnnnnnnnnnnnnnnnnnnnnnnnnnnnnnnnnnnnnnnnnnnnnnnnnnnnnnnnnnnnnnnnnnnnnnnnnnnnnnnnnnnnnnnnnnnnnnnnnnnnnnnnnnnnnnnnnnnnnnnnnnnnnnnnnnnnnnnnnnnnnnnnnnnnnnnnnnnnnnnnnnnnnnnnnnnnnnnnnnnnnnnnnnnnnnnnnnnnnnnnnnnnnnnnnnnnnnnnnnnnnnnnnnnnnnnnnnnnnnnnnnnnnnnnnnnnnnnnnnnnnnnnnnnnnnnnnnnnnnnnnnnnnnnnnnnnnnnnnnnnnnnnnnnnnnnnnnnnnnnnnnnnnnnnnnnnnnnnnnnnnnnnnnnnnnnnnnnnnnnnnnnnnnnnnnnnnnnnnnnnnnnnnnnnnnnnnnnnnnnnnnnnnnnnnnnnnnnnnnnnnnnnnnnnnnnnnnnnnnnnnnnnnnnnnnnnnnnnnnnnnnnnnnnnnnnnnnnnnnnnnnnnnnnnnnnnnnnnnnnnnnnnnnnnnnnnnnnnnnnnnnnnnnnnnnnnnnnnnnnnnnnnnnnnnnnnnnnnnnnnnnnnnnnnnnnnnnnnnnnnnnnnnnnnnnnnnnnnnnnnnnnnnnnnnnnnnnnnnnnnnnnnnnnnnnnnnnnnnnnnnnnnnnnnnnnnnnnnnnnnnnnnnnnnnnnnnnnnnnnnnnnnnnnnnnnnnnnnnnnnnnnnnnnnnnnnnnnnnnnnnnnnnnnnnnnnnnnnnnnnnnnnnnnnnnnnnnnnnnnnnnnnnnnnnnnnnnnnnnnnnnnnnnnnnnnnnnnnnnnnnnnnnnnnnnnnnnnnnnnnnnnnnnnnnnnnnnnnnnnnnnnnnnnnnnnnnnnnnnnnnnnnnnnnnnnnnnnnnnnnnnnnnnnnnnnnnnnnnnnnnnnnnnnnnnnnnnnnnnnnnnnnnnnnnnnnnnnnnnnnnnnnnnnnnnnnnnnnnnnnnnnnnnnnnnnnnnnnnnnnnnnnnnnnnnnnnnnnnnnnnnnnnnnnnnnnnnnnnnnnnnnnnnnnnnnnnnnnnnnnnnnnnnnnnnnnnnnnnnnnnnnnnnnnnnnnnnnnnnnnnnnnnnnnnnnnnnnnnnnnnnnnnnnnnnnnnnnnnnnnnnnnnnnnnnnnnnnnnnnnnnnnnnnnnnnnnnnnnnnnnnnnnnnnnnnnnnnnnnnnnnnnnnnnnnnnnnnnnnnnnnnnnnnnnnnnnnnnnnnnnnnnnnnnnnnnnnnnnnnnnnnnnnnnnnnnnnnnnnnnnnnnnnnnnnnnnnnnnnnnnnnnnnnnnnnnnnnnnnnnnnnnnnnnnnnnnnnnnnnnnnnnnnnnnnnnnnnnnnnnnnnnnnnnnnnnnnnnnnnnnnnnnnnnnnnnnnnnnnnnnnnnnnnnnnnnnnnnnnnnnnnnnnnnnnnnnnnnnnnnnnnnnnnnnnnnnnnnnnnnnnnnnnnnnnnnnnnnnnnnnnnnnnnnnnnnnnnnnnnnnnnnnnnnnnnnnnnnnnnnnnnnnnnnnnnnnnnnnnnnnnnnnnnnnnnnnnnnnnnnnnnnnnnnnnnnnnnnnnnnnnnnnnnnnnnnnnnnnnnnnnnnnnnnnnnnnnnnnnnnnnnnnnnnnnnnnnnnnnnnnnnnnnnnnnnnnnnnnnnnnnnnnnnnnnnnnnnnnnnnnnnnnnnnnnnnnnnnnnnnnnnnnnnnnnnnnnnnnnnnnnnnnnnnnnnnnnnnnnnnnnnnnnnnnnnnnnnnnnnnnnnnnnnnnnnnnnnnnnnnnnnnnnnnnnnnnnnnnnnnnnnnnnnnnnnnnnnnnnnnnnnnnnnnnnnnnnnnnnnnnnnnnnnnnnnnnnnnnnnnnnnnnnnnnnnnnnnnnnnnnnnnnnnnnnnnnnnnnnnnnnnnnnnnnnnnnnnnnnnnnnnnnnnnnnnnnnnnnnnnnnnnnnnnnnnnnnnnnnnnnnnnnnnnnnnnnnnnnnnnnnnnnnnnnnnnnnnnnnnnnnnnnnnnnnnnnnnnnnnnnnnnnnnnnnnnnnnnnnnnnnnnnnnnnnnnnnnnnnnnnnnnnnnnnnnnnnnnnnnnnnnnnnnnnnnnnnnnnnnnnnnnnnnnnnnnnnnnnnnnnnnnnnnnnnnnnnnnnnnnnnnnnnnnnnnnnnnnnnnnnnnnnnnnnnnnnnnnnnnnnnnnnnnnnnnnnnnnnnnnnnnnnnnnnnnnnnnnnnnnnnnnnnnnnnnnnnnnnnnnnnnnnnnnnnnnnnnnnnnnnnnnnnnnnnnnnnnnnnnnnnnnnnnnnnnnnnnnnnnnnnnnnnnnnnnnnnnnnnnnnnnnnnnnnnnnnnnnnnnnnnnnnnnnnnnnnnnnnnnnnnnnnnnnnnnnnnnnnnnnnnnnnnnnnnnnnnnnnnnnnnnnnnnnnnnnnnnnnnnnnnnnnnnnnnnnnnnnnnnnnnnnnnnnnnnnnnnnnnnnnnnnnnnnnnnnnnnnnnnnnnnnnnnnnnnnnnnnnnnnnnnnnnnnnnnnnnnnnnnnnnnnnnnnnnnnnnnnnnnnnnnnnnnnnnnnnnnnnnnnnnnnnnnnnnnnnnnnnnnnnnnnnnnnnnnnnnnnnnnnnnnnnnnnnnnnnnnnnnnnnnnnnnnnnnnnnnnnnnnnnnnnnnnnnnnnnnnnnnnnnnnnnnnnnnnnnnnnnnnnnnnnnnnnnnnnnnnnnnnnnnnnnnnnnnnnnnnnnnnnnnnnnnnnnnnnnnnnnnnnnnnnnnnnnnnnnnnnnnnnnnnnnnnnnnnnnnnnnnnnnnnnnnnnnnnnnnnnnnnnnnnnnnnnnnnnnnnnnnnnnnnnnnnnnnnnnnnnnnnnnnnnnnnnnnnnnnnnnnnnnnnnnnnnnnnnnnnnnnnnnnnnnnnnnnnnnnnnnnnnnnnnnnnnnnnnnnnnnnnnnnnnnnnnnnnnnnnnnnnnnnnnnnnnnnnnnnnnnnnnnnnnnnnnnnnnnnnnnnnnnnnnnnnnnnnnnnnnnnnnnnnnnnnnnnnnnnnnnnnnnnnnnnnnnnnnnnnnnnnnnnnnnnnnnnnnnnnnnnnnnnnnnnnnnnnnnnnnnnnnnnnnnnnnnnnnnnnnnnnnnnnnnnnnnnnnnnnnnnnnnnnnnnnnnnnnnnnnnnnnnnnnnnnnnnnnnnnnnnnnnnnnnnnnnnnnnnnnnnnnnnnnnnnnnnnnnnnnnnnnnnnnnnnnnnnnnnnnnnnnnnnnnnnnnnnnnnnnnnnnnnnnnnnnnnnnnnnnnnnnnnnnnnnnnnnnnnnnnnnnnnnnnnnnnnnnnnnnnnnnnnnnnnnnnnnnnnnnnnnnnnnnnnnnnnnnnnnnnnnnnnnnnnnnnnnnnnnnnnnnnnnnnnnnnnnnnnnnnnnnnnnnnnnnnnnnnnnnnnnnnnnnnnnnnnnnnnnnnnnnnnnnnnnnnnnnnnnnnnnnnnnnnnnnnnnnnnnnnnnnnnnnnnnnnnnnnnnnnnnnnnnnnnnnnnnnnnnnnnnnnnnnnnnnnnnnnnnnnnnnnnnnnnnnnnnnnnnnnnnnnnnnnnnnnnnnnnnnnnnnnnnnnnnnnnnnnnnnnnnnnnnnnnnnnnnnnnnnnnnnnnnnnnnnnnnnnnnnnnnnnnnnnnnnnnnnnnnnnnnnnnnnnnnnnnnnnnnnnnnnnnnnnnnnnnnnnnnnnnnnnnnnnnnnnnnnnnnnnnnnnnnnnnnnnnnnnnnnnnnnnnnnnnnnnnnnnnnnnnnnnnnnnnnnnnnnnnnnnnnnnnnnnnnnnnnnnnnnnnnnnnnnnnnnnnnnnnnnnnnnnnnnnnnnnnnnnnnnnnnnnnnnnnnnnnnnnnnnnnnnnnnnnnnnnnnnnnnnnnnnnnnnnnnnnnnnnnnnnnnnnnnnnnnnnnnnnnnnnnnnnnnnnnnnnnnnnnnnnnnnnnnnnnnnnnnnnnnnnnnnnnnnnnnnnnnnnnnnnnnnnnnnnnnnnnnnnnnnnnnnnnnnnnnnnnnnnnnnnnnnnnnnnnnnnnnnnnnnnnnnnnnnnnnnnnnnnnnnnnnnnnnnnnnnnnnnnnnnnnnnnnnnnnnnnnnnnnnnnnnnnnnnnnnnnnnnnnnnnnnnnnnnnnnnnnnnnnnnnnnnnnnnnnnnnnnnnnnnnnnnnnnnnnnnnnnnnnnnnnnnnnnnnnnnnnnnnnnnnnnnnnnnnnnnnnnnnnnnnnnnnnnnnnnnnnnnnnnnnnnnnnnnnnnnnnnnnnnnnnnnnnnnnnnnnnnnnnnnnnnnnnnnnnnnnnnnnnnnnnnnnnnnnnnnnnnnnnnnnnnnnnnnnnnnnnnnnnnnnnnnnnnnnnnnnnnnnnnnnnnnnnnnnnnnnnnnnnnnnnnnnnnnnnnnnnnnnnnnnnnnnnnnnnnnnnnnnnnnnnnnnnnnnnnnnnnnnnnnnnnnnnnnnnnnnnnnnnnnnnnnnnnnnnnnnnnnnnnnnnnnnnnnnnnnnnnnnnnnnnnnnnnnnnnnnnnnnnnnnnnnnnnnnnnnnnnnnnnnnnnnnnnnnnnnnnnnnnnnnnnnnnnnnnnnnnnnnnnnnnnnnnnnnnnnnnnnnnnnnnnnnnnnnnnnnnnnnnnnnnnnnnnnnnnnnnnnnnnnnnnnnnnnnnnnnnnnnnnnnnnnnnnnnnnnnnnnnnnnnnnnnnnnnnnnnnnnnnnnnnnnnnnnnnnnnnnnnnnnnnnnnnnnnnnnnnnnnnnnnnnnnnnnnnnnnnnnnnnnnnnnnnnnnnnnnnnnnnnnnnnnnnnnnnnnnnnnnnnnnnnnnnnnnnnnnnnnnnnnnnnnnnnnnnnnnnnnnnnnnnnnnnnnnnnnnnnnnnnnnnnnnnnnnnnnnnnnnnnnnnnnnnnnnnnnnnnnnnnnnnnnnnnnnnnnnnnnnnnnnnnnnnnnnnnnnnnnnnnnnnnnnnnnnnnnnnnnnnnnnnnnnnnnnnnnnnnnnnnnnnnnnnnnnnnnnnnnnnnnnnnnnnnnnnnnnnnnnnnnnnnnnnnnnnnnnnnnnnnnnnnnnnnnnnnnnnnnnnnnnnnnnnnnnnnnnnnnnnnnnnnnnnnnnnnnnnnnnnnnnnnnnnnnnnnnnnnnnnnnnnnnnnnnnnnnnnnnnnnnnnnnnnnnnnnnnnnnnnnnnnnnnnnnnnnnnnnnnnnnnnnnnnnnnnnnnnnnnnnnnnnnnnnnnnnnnnnnnnnnnnnnnnnnnnnnnnnnnnnnnnnnnnnnnnnnnnnnnnnnnnnnnnnnnnnnnnnnnnnnnnnnnnnnnnnnnnnnnnnnnnnnnnnnnnnnnnnnnnnnnnnnnnnnnnnnnnnnnnnnnnnnnnnnnnnnnnnnnnnnnnnnnnnnnnnnnnnnnnnnnnnnnnnnnnnnnnnnnnnnnnnnnnnnnnnnnnnnnnnnnnnnnnnnnnnnnnnnnnnnnnnnnnnnnnnnnnnnnnnnnnnnnnnnnnnnnnnnnnnnnnnnnnnnnnnnnnnnnnnnnnnnnnnnnnnnnnnnnnnnnnnnnnnnnnnnnnnnnnnnnnnnnnnnnnnnnnnnnnnnnnnnnnnnnnnnnnnnnnnnnnnnnnnnnnnnnnnnnnnnnnnnnnnnnnnnnnnnnnnnnnnnnnnnnnnnnnnnnnnnnnnnnnnnnnnnnnnnnnnnnnnnnnnnnnnnnnnnnnnnnnnnnnnnnnnnnnnnnnnnnnnnnnnnnnnnnnnnnnnnnnnnnnnnnnnnnnnnnnnnnnnnnnnnnnnnnnnnnnnnnnnnnnnnnnnnnnnnnnnnnnnnnnnnnnnnnnnnnnnnnnnnnnnnnnnnnnnnnnnnnnnnnnnnnnnnnnnnnnnnnnnnnnnnnnnnnnnnnnnnnnnnnnnnnnnnnnnnnnnnnnnnnnnnnnnnnnnnnnnnnnnnnnnnnnnnnnnnnnnnnnnnnnnnnnnnnnnnnnnnnnnnnnnnnnnnnnnnnnnnnnnnnnnnnnnnnnnnnnnnnnnnnnnnnnnnnnnnnnnnnnnnnnnnnnnnnnnnnnnnnnnnnnnnnnnnnnnnnnnnnnnnnnnnnnnnnnnnnnnnnnnnnnnnnnnnnnnnnnnnnnnnnnnnnnnnnnnnnnnnnnnnnnnnnnnnnnnnnnnnnnnnnnnnnnnnnnnnnnnnnnnnnnnnnnnnnnnnnnnnnnnnnnnnnnnnnnnnnnnnnnnnnnnnnnnnnnnnnnnnnnnnnnnnnnnnnnnnnnnnnnnnnnnnnnnnnnnnnnnnnnnnnnnnnnnnnnnnnnnnnnnnnnnnnnnnnnnnnnnnnnnnnnnnnnnnnnnnnnnnnnnnnnnnnnnnnnnnnnnnnnnnnnnnnnnnnnnnnnnnnnnnnnnnnnnnnnnnnnnnnnnnnnnnnnnnnnnnnnnnnnnnnnnnnnnnnnnnnnnnnnnnnnnnnnnnnnnnnnnnnnnnnnnnnnnnnnnnnnnnnnnnnnnnnnnnnnnnnnnnnnnnnnnnnnnnnnnnnnnnnnnnnnnnnnnnnnnnnnnnnnnnnnnnnnnnnnnnnnnnnnnnnnnnnnnnnnnnnnnnnnnnnnnnnnnnnnnnnnnnnnnnnnnnnnnnnnnnnnnnnnnnnnnnnnnnnnnnnnnnnnnnnnnnnnnnnnnnnnnnnnnnnnnnnnnnnnnnnnnnnnnnnnnnnnnnnnnnnnnnnnnnnnnnnnnnnnnnnnnnnnnnnnnnnnnnnnnnnnnnnnnnnnnnnnnnnnnnnnnnnnnnnnnnnnnnnnnnnnnnnnnnnnnnnnnnnnnnnnnnnnnnnnnnnnnnnnnnnnnnnnnnnnnnnnnnnnnnnnnnnnnnnnnnnnnnnnnnnnnnnnnnnnnnnnnnnnnnnnnnnnnnnnnnnnnnnnnnnnnnnnnnnnnnnnnnnnnnnnnnnnnnnnnnnnnnnnnnnnnnnnnnnnnnnnnnnnnnnnnnnnnnnnnnnnnnnnnnnnnnnnnnnnnnnnnnnnnnnnnnnnnnnnnnnnnnnnnnnnnnnnnnnnnnnnnnnnnnnnnnnnnnnnnnnnnnnnnnnnnnnnnnnnnnnnnnnnnnnnnnnnnnnnnnnnnnnnnnnnnnnnnnnnnnnnnnnnnnnnnnnnnnnnnnnnnnnnnnnnnnnnnnnnnnnnnnnnnnnnnnnnnnnnnnnnnnnnnnnnnnnnnnnnnnnnnnnnnnnnnnnnnnnnnnnnnnnnnnnnnnnnnnnnnnnnnnnnnnnnnnnnnnnnnnnnnnnnnnnnnnnnnnnnnnnnnnnnnnnnnnnnnnnnnnnnnnnnnnnnnnnnnnnnnnnnnnnnnnnnnnnnnnnnnnnnnnnnnnnnnnnnnnnnnnnnnnnnnnnnnnnnnnnnnnnnnnnnnnnnnnnnnnnnnnnnnnnnnnnnnnnnnnnnnnnnnnnnnnnnnnnnnnnnnnnnnnnnnnnnnnnnnnnnnnnnnnnnnnnnnnnnnnnnnnnnnnnnnnnnnnnnnnnnnnnnnnnnnnnnnnnnnnnnnnnnnnnnnnnnnnnnnnnnnnnnnnnnnnnnnnnnnnnnnnnnnnnnnnnnnnnnnnnnnnnnnnnnnnnnnnnnnnnnnnnnnnnnnnnnnnnnnnnnnnnnnnnnnnnnnnnnnnnnnnnnnnnnnnnnnnnnnnnnnnnnnnnnnnnnnnnnnnnnnnnnnnnnnnnnnnnnnnnnnnnnnnnnnnnnnnnnnnnnnnnnnnnnnnnnnnnnnnnnnnnnnnnnnnnnnnnnnnnnnnnnnnnnnnnnnnnnnnnnnnnnnnnnnnnnnnnnnnnnnnnnnnnnnnnnnnnnnnnnnnnnnnnnnnnnnnnnnnnnnnnnnnnnnnnnnnnnnnnnnnnnnnnnnnnnnnnnnnnnnnnnnnnnnnnnnnnnnnnnnnnnnnnnnnnnnnnnnnnnnnnnnnnnnnnnnnnnnnnnnnnnnnnnnnnnnnnnnnnnnnnnnnnnnnnnnnnnnnnnnnnnnnnnnnnnnnnnnnnnnnnnnnnnnnnnnnnnnnnnnnnnnnnnnnnnnnnnnnnnnnnnnnnnnnnnnnnnnnnnnnnnnnnnnnnnnnnnnnnnnnnnnnnnnnnnnnnnnnnnnnnnnnnnnnnnnnnnnnnnnnnnnnnnnnnnnnnnnnnnnnnnnnnnnnnnnnnnnnnnnnnnnnnnnnnnnnnnnnnnnnnnnnnnnnnnnnnnnnnnnnnnnnnnnnnnnnnnnnnnnnnnnnnnnnnnnnnnnnnnnnnnnnnnnnnnnnnnnnnnnnnnnnnnnnnnnnnnnnnnnnnnnnnnnnnnnnnnnnnnnnnnnnnnnnnnnnnnnnnnnnnnnnnnnnnnnnnnnnnnnnnnnnnnnnnnnnnnnnnnnnnnnnnnnnnnnnnnnnnnnnnnnnnnnnnnnnnnnnnnnnnnnnnnnnnnnnnnnnnnnnnnnnnnnnnnnnnnnnnnnnnnnnnnnnnnnnnnnnnnnnnnnnnnnnnnnnnnnnnnnnnnnnnnnnnnnnnnnnnnnnnnnnnnnnnnnnnnnnnnnnnnnnnnnnnnnnnnnnnnnnnnnnnnnnnnnnnnnnnnnnnnnnnnnnnnnnnnnnnnnnnnnnnnnnnnnnnnnnnnnnnnnnnnnnnnnnnnnnnnnnnnnnnnnnnnnnnnnnnnnnnnnnnnnnnnnnnnnnnnnnnnnnnnnnnnnnnnnnnnnnnnnnnnnnnnnnnnnnnnnnnnnnnnnnnnnnnnnnnnnnnnnnnnnnnnnnnnnnnnnnnnnnnnnnnnnnnnnnnnnnnnnnnnnnnnnnnnnnnnnnnnnnnnnnnnnnnnnnnnnnnnnnnnnnnnnnnnnnnnnnnnnnnnnnnnnnnnnnnnnnnnnnnnnnnnnnnnnnnnnnnnnnnnnnnnnnnnnnnnnnnnnnnnnnnnnnnnnnnnnnnnnnnnnnnnnnnnnnnnnnnnnnnnnnnnnnnnnnnnnnnnnnnnnnnnnnnnnnnnnnnnnnnnnnnnnnnnnnnnnnnnnnnnnnnnnnnnnnnnnnnnnnnnnnnnnnnnnnnnnnnnnnnnnnnnnnnnnnnnnnnnnnnnnnnnnnnnnnnnnnnnnnnnnnnnnnnnnnnnnnnnnnnnnnnnnnnnnnnnnnnnnnnnnnnnnnnnnnnnnnnnnnnnnnnnnnnnnnnnnnnnnnnnnnnnnnnnnnnnnnnnnnnnnnnnnnnnnnnnnnnnnnnnnnnnnnnnnnnnnnnnnnnnnnnnnnnnnnnnnnnnnnnnnnnnnnnnnnnnnnnnnnnnnnnnnnnnnnnnnnnnnnnnnnnnnnnnnnnnnnnnnnnnnnnnnnnnnnnnnnnnnnnnnnnnnnnnnnnnnnnnnnnnnnnnnnnnnnnnnnnnnnnnnnnnnnnnnnnnnnnnnnnnnnnnnnnnnnnnnnnnnnnnnnnnnnnnnnnnnnnnnnnnnnnnnnnnnnnnnnnnnnnnnnnnnnnnnnnnnnnnnnnnnnnnnnnnnnnnnnnnnnnnnnnnnnnnnnnnnnnnnnnnnnnnnnnnnnnnnnnnnnnnnnnnnnnnnnnnnnnnnnnnnnnnnnnnnnnnnnnnnnnnnnnnnnnnnnnnnnnnnnnnnnnnnnnnnnnnnnnnnnnnnnnnnnnnnnnnnnnnnnnnnnnnnnnnnnnnnnnnnnnnnnnnnnnnnnnnnnnnnnnnnnnnnnnnnnnnnnnnnnnnnnnnnnnnnnnnnnnnnnnnnnnnnnnnnnnnnnnnnnnnnnnnnnnnnnnnnnnnnnnnnnnnnnnnnnnnnnnnnnnnnnnnnnnnnnnnnnnnnnnnnnnnnnnnnnnnnnnnnnnnnnnnnnnnnnnnnnnnnnnnnnnnnnnnnnnnnnnnnnnnnnnnnnnnnnnnnnnnnnnnnnnnnnnnnnnnnnnnnnnnnnnnnnnnnnnnnnnnnnnnnnnnnnnnnnnnnnnnnnnnnnnnnnnnnnnnnnnnnnnnnnnnnnnnnnnnnnnnnnnnnnnnnnnnnnnnnnnnnnnnnnnnnnnnnnnnnnnnnnnnnnnnnnnnnnnnnnnnnnnnnnnnnnnnnnnnnnnnnnnnnnnnnnnnnnnnnnnnnnnnnnnnnnnnnnnnnnnnnnnnnnnnnnnnnnnnnnnnnnnnnnnnnnnnnnnnnnnnnnnnnnnnnnnnnnnnnnnnnnnnnnnnnnnnnnnnnnnnnnnnnnnnnnnnnnnnnnnnnnnnnnnnnnnnnnnnnnnnnnnnnnnnnnnnnnnnnnnnnnnnnnnnnnnnnnnnnnnnnnnnnnnnnnnnnnnnnnnnnnnnnnnnnnnnnnnnnnnnnnnnnnnnnnnnnnnnnnnnnnnnnnnnnnnnnnnnnnnnnnnnnnnnnnnnnnnnnnnnnnnnnnnnnnnnnnnnnnnnnnnnnnnnnnnnnnnnnnnnnnnnnnnnnnnnnnnnnnnnnnnnnnnnnnnnnnnnnnnnnnnnnnnnnnnnnnnnnnnnnnnnnnnnnnnnnnnnnnnnnnnnnnnnnnnnnnnnnnnnnnnnnnnnnnnnnnnnnnnnnnnnnnnnnnnnnnnnnnnnnnnnnnnnnnnnnnnnnnnnnnnnnnnnnnnnnnnnnnnnnnnnnnnnnnnnnnnnnnnnnnnnnnnnnnnnnnnnnnnnnnnnnnnnnnnnnnnnnnnnnnnnnnnnnnnnnnnnnnnnnnnnnnnnnnnnnnnnnnnnnnnnnnnnnnnnnnnnnnnnnnnnnnnnnnnnnnnnnnnnnnnnnnnnnnnnnnnnnnnnnnnnnnnnnnnnnnnnnnnnnnnnnnnnnnnnnnnnnnnnnnnnnnnnnnnnnnnnnnnnnnnnnnnnnnnnnnnnnnnnnnnnnnnnnnnnnnnnnnnnnnnnnnnnnnnnnnnnnnnnnnnnnnnnnnnnnnnnnnnnnnnnnnnnnnnnnnnnnnnnnnnnnnnnnnnnnnnnnnnnnnnnnnnnnnnnnnnnnnnnnnnnnnnnnnnnnnnnnnnnnnnnnnnnnnnnnnnnnnnnnnnnnnnnnnnnnnnnnnnnnnnnnnnnnnnnnnnnnnnnnnnnnnnnnnnnnnnnnnnnnnnnnnnnnnnnnnnnnnnnnnnnnnnnnnnnnnnnnnnnnnnnnnnnnnnnnnnnnnnnnnnnnnnnnnnnnnnnnnnnnnnnnnnnnnnnnnnnnnnnnnnnnnnnnnnnnnnnnnnnnnnnnnnnnnnnnnnnnnnnnnnnnnnnnnnnnnnnnnnnnnnnnnnnnnnnnnnnnnnnnnnnnnnnnnnnnnnnnnnnnnnnnnnnnnnnnnnnnnnnnnnnnnnnnnnnnnnnnnnnnnnnnnnnnnnnnnnnnnnnnnnnnnnnnnnnnnnnnnnnnnnnnnnnnnnnnnnnnnnnnnnnnnnnnnnnnnnnnnnnnnnnnnnnnnnnnnnnnnnnnnnnnnnnnnnnnnnnnnnnnnnnnnnnnnnnnnnnnnnnnnnnnnnnnnnnnnnnnnnnnnnnnnnnnnnnnnnnnnnnnnnnnnnnnnnnnnnnnnnnnnnnnnnnnnnnnnnnnnnnnnnnnnnnnnnnnnnnnnnnnnnnnnnnnnnnnnnnnnnnnnnnnnnnnnnnnnnnnnnnnnnnnnnnnnnnnnnnnnnnnnnnnnnnnnnnnnnnnnnnnnnnnnnnnnnnnnnnnnnnnnnnnnnnnnnnnnnnnnnnnnnnnnnnnnnnnnnnnnnnnnnnnnnnnnnnnnnnnnnnnnnnnnnnnnnnnnnnnnnnnnnnnnnnnnnnnnnnnnnnnnnnnnnnnnnnnnnnnnnnnnnnnnnnnnnnnnnnnnnnnnnnnnnnnnnnnnnnnnnnnnnnnnnnnnnnnnnnnnnnnnnnnnnnnnnnnnnnnnnnnnnnnnnnnnnnnnnnnnnnnnnnnnnnnnnnnnnnnnnnnnnnnnnnnnnnnnnnnnnnnnnnnnnnnnnnnnnnnnnnnnnnnnnnnnnnnnnnnnnnnnnnnnnnnnnnnnnnnnnnnnnnnnnnnnnnnnnnnnnnnnnnnnnnnnnnnnnnnnnnnnnnnnnnnnnnnnnnnnnnnnnnnnnnnnnnnnnnnnnnnnnnnnnnnnnnnnnnnnnnnnnnnnnnnnnnnnnnnnnnnnnnnnnnnnnnnnnnnnnnnnnnnnnnnnnnnnnnnnnnnnnnnnnnnnnnnnnnnnnnnnnnnnnnnnnnnnnnnnnnnnnnnnnnnnnnnnnnnnnnnnnnnnnnnnnnnnnnnnnnnnnnnnnnnnnnnnnnnnnnnnnnnnnnnnnnnnnnnnnnnnnnnnnnnnnnnnnnnnnnnnnnnnnnnnnnnnnnnnnnnnnnnnnnnnnnnnnnnnnnnnnnnnnnnnnnnnnnnnnnnnnnnnnnnnnnnnnnnnnnnnnnnnnnnnnnnnnnnnnnnnnnnnnnnnnnnnnnnnnnnnnnnnnnnnnnnnnnnnnnnnnnnnnnnnnnnnnnnnnnnnnnnnnnnnnnnnnnnnnnnnnnnnnnnnnnnnnnnnnnnnnnnnnnnnnnnnnnnnnnnnnnnnnnnnnnnnnnnnnnnnnnnnnnnnnnnnnnnnnnnnnnnnnnnnnnnnnnnnnnnnnnnnnnnnnnnnnnnnnnnnnnnnnnnnnnnnnnnnnnnnnnnnnnnnnnnnnnnnnnnnnnnnnnnnnnnnnnnnnnnnnnnnnnnnnnnnnnnnnnnnnnnnnnnnnnnnnnnnnnnnnnnnnnnnnnnnnnnnnnnnnnnnnnnnnnnnnnnnnnnnnnnnnnnnnnnnnnnnnnnnnnnnnnnnnnnnnnnnnnnnnnnnnnnnnnnnnnnnnnnnnnnnnnnnnnnnnnnnnnnnnnnnnnnnnnnnnnnnnnnnnnnnnnnnnnnnnnnnnnnnnnnnnnnnnnnnnnnnnnnnnnnnnnnnnnnnnnnnnnnnnnnnnnnnnnnnnnnnnnnnnnnnnnnnnnnnnnnnnnnnnnnnnnnnnnnnnnnnnnnnnnnnnnnnnnnnnnnnnnnnnnnnnnnnnnnnnnnnnnnnnnnnnnnnnnnnnnnnnnnnnnnnnnnnnnnnnnnnnnnnnnnnnnnnnnnnnnnnnnnnnnnnnnnnnnnnnnnnnnnnnnnnnnnnnnnnnnnnnnnnnnnnnnnnnnnnnnnnnnnnnnnnnnnnnnnnnnnnnnnnnnnnnnnnnnnnnnnnnnnnnnnnnnnnnnnnnnnnnnnnnnnnnnnnnnnnnnnnnnnnnnnnnnnnnnnnnnnnnnnnnnnnnnnnnnnnnnnnnnnnnnnnnnnnnnnnnnnnnnnnnnnnnnnnnnnnnnnnnnnnnnnnnnnnnnnnnnnnnnnnnnnnnnnnnnnnnnnnnnnnnnnnnnnnnnnnnnnnnnnnnnnnnnnnnnnnnnnnnnnnnnnnnnnnnnnnnnnnnnnnnnnnnnnnnnnnnnnnnnnnnnnnnnnnnnnnnnnnnnnnnnnnnnnnnnnnnnnnnnnnnnnnnnnnnnnnnnnnnnnnnnnnnnnnnnnnnnnnnnnnnnnnnnnnnnnnnnnnnnnnnnnnnnnnnnnnnnnnnnnnnnnnnnnnnnnnnnnnnnnnnnnnnnnnnnnnnnnnnnnnnnnnnnnnnnnnnnnnnnnnnnnnnnnnnnnnnnnnnnnnnnnnnnnnnnnnnnnnnnnnnnnnnnnnnnnnnnnnnnnnnnnnnnnnnnnnnnnnnnnnnnnnnnnnnnnnnnnnnnnnnnnnnnnnnnnnnnnnnnnnnnnnnnnnnnnnnnnnnnnnnnnnnnnnnnnnnnnnnnnnnnnnnnnnnnnnnnnnnnnnnnnnnnnnnnnnnnnnnnnnnnnnnnnnnnnnnnnnnnnnnnnnnnnnnnnnnnnnnnnnnnnnnnnnnnnnnnnnnnnnnnnnnnnnnnnnnnnnnnnnnnnnnnnnnnnnnnnnnnnnnnnnnnnnnnnnnnnnnnnnnnnnnnnnnnnnnnnnnnnnnnnnnnnnnnnnnnnnnnnnnnnnnnnnnnnnnnnnnnnnnnnnnnnnnnnnnnnnnnnnnnnnnnnnnnnnnnnnnnnnnnnnnnnnnnnnnnnnnnnnnnnnnnnnnnnnnnnnnnnnnnnnnnnnnnnnnnnnnnnnnnnnnnnnnnnnnnnnnnnnnnnnnnnnnnnnnnnnnnnnnnnnnnnnnnnnnnnnnnnnnnnnnnnnnnnnnnnnnnnnnnnnnnnnnnnnnnnnnnnnnnnnnnnnnnnnnnnnnnnnnnnnnnnnnnnnnnnnnnnnnnnnnnnnnnnnnnnnnnnnnnnnnnnnnnnnnnnnnnnnnnnnnnnnnnnnnnnnnnnnnnnnnnnnnnnnnnnnnnnnnnnnnnnnnnnnnnnnnnnnnnnnnnnnnnnnnnnnnnnnnnnnnnnnnnnnnnnnnnnnnnnnnnnnnnnnnnnnnnnnnnnnnnnnnnnnnnnnnnnnnnnnnnnnnnnnnnnnnnnnnnnnnnnnnnnnnnnnnnnnnnnnnnnnnnnnnnnnnnnnnnnnnnnnnnnnnnnnnnnnnnnnnnnnnnnnnnnnnnnnnnnnnnnnnnnnnnnnnnnnnnnnnnnnnnnnnnnnnnnnnnnnnnnnnnnnnnnnnnnnnnnnnnnnnnnnnnnnnnnnnnnnnnnnnnnnnnnnnnnnnnnnnnnnnnnnnnnnnnnnnnnnnnnnnnnnnnnnnnnnnnnnnnnnnnnnnnnnnnnnnnnnnnnnnnnnnnnnnnnnnnnnnnnnnnnnnnnnnnnnnnnnnnnnnnnnnnnnnnnnnnnnnnnnnnnnnnnnnnnnnnnnnnnnnnnnnnnnnnnnnnnnnnnnnnnnnnnnnnnnnnnnnnnnnnnnnnnnnnnnnnnnnnnnnnnnnnnnnnnnnnnnnnnnnnnnnnnnnnnnnnnnnnnnnnnnnnnnnnnnnnnnnnnnnnnnnnnnnnnnnnnnnnnnnnnnnnnnnnnnnnnnnnnnnnnnnnnnnnnnnnnnnnnnnnnnnnnnnnnnnnnnnnnnnnnnnnnnnnnnnnnnnnnnnnnnnnnnnnnnnnnnnnnnnnnnnnnnnnnnnnnnnnnnnnnnnnnnnnnnnnnnnnnnnnnnnnnnnnnnnnnnnnnnnnnnnnnnnnnnnnnnnnnnnnnnnnnnnnnnnnnnnnnnnnnnnnnnnnnnnnnnnnnnnnnnnnnnnnnnnnnnnnnnnnnnnnnnnnnnnnnnnnnnnnnnnnnnnnnnnnnnnnnnnnnnnnnnnnnnnnnnnnnnnnnnnnnnnnnnnnnnnnnnnnnnnnnnnnnnnnnnnnnnnnnnnnnnnnnnnnnnnnnnnnnnnnnnnnnnnnnnnnnnnnnnnnnnnnnnnnnnnnnnnnnnnnnnnnnnnnnnnnnnnnnnnnnnnnnnnnnnnnnnnnnnnnnnnnnnnnnnnnnnnnnnnnnnnnnnnnnnnnnnnnnnnnnnnnnnnnnnnnnnnnnnnnnnnnnnnnnnnnnnnnnnnnnnnnnnnnnnnnnnnnnnnnnnnnnnnnnnnnnnnnnnnnnnnnnnnnnnnnnnnnnnnnnnnnnnnnnnnnnnnnnnnnnnnnnnnnnnnnnnnnnnnnnnnnnnnnnnnnnnnnnnnnnnnnnnnnnnnnnnnnnnnnnnnnnnnnnnnnnnnnnnnnnnnnnnnnnnnnnnnnnnnnnnnnnnnnnnnnnnnnnnnnnnnnnnnnnnnnnnnnnnnnnnnnnnnnnnnnnnnnnnnnnnnnnnnnnnnnnnnnnnnnnnnnnnnnnnnnnnnnnnnnnnnnnnnnnnnnnnnnnnnnnnnnnnnnnnnnnnnnnnnnnnnnnnnnnnnnnnnnnnnnnnnnnnnnnnnnnnnnnnnnnnnnnnnnnnnnnnnnnnnnnnnnnnnnnnnnnnnnnnnnnnnnnnnnnnnnnnnnnnnnnnnnnnnnnnnnnnnnnnnnnnnnnnnnnnnnnnnnnnnnnnnnnnnnnnnnnnnnnnnnnnnnnnnnnnnnnnnnnnnnnnnnnnnnnnnnnnnnnnnnnnnnnnnnnnnnnnnnnnnnnnnnnnnnnnnnnnnnnnnnnnnnnnnnnnnnnnnnnnnnnnnnnnnnnnnnnnnnnnnnnnnnnnnnnnnnnnnnnnnnnnnnnnnnnnnnnnnnnnnnnnnnnnnnnnnnnnnnnnnnnnnnnnnnnnnnnnnnnnnnnnnnnnnnnnnnnnnnnnnnnnnnnnnnnnnnnnnnnnnnnnnnnnnnnnnnnnnnnnnnnnnnnnnnnnnnnnnnnnnnnnnnnnnnnnnnnnnnnnnnnnnnnnnnnnnnnnnnnnnnnnnnnnnnnnnnnnnnnnnnnnnnnnnnnnnnnnnnnnnnnnnnnnnnnnnnnnnnnnnnnnnnnnnnnnnnnnnnnnnnnnnnnnnnnnnnnnnnnnnnnnnnnnnnnnnnnnnnnnnnnnnnnnnnnnnnnnnnnnnnnnnnnnnnnnnnnnnnnnnnnnnnnnnnnnnnnnnnnnnnnnnnnnnnnnnnnnnnnnnnnnnnnnnnnnnnnnnnnnnnnnnnnnnnnnnnnnnnnnnnnnnnnnnnnnnnnnnnnnnnnnnnnnnnnnnnnnnnnnnnnnnnnnnnnnnnnnnnnnnnnnnnnnnnnnnnnnnnnnnnnnnnnnnnnnnnnnnnnnnnnnnnnnnnnnnnnnnnnnnnnnnnnnnnnnnnnnnnnnnnnnnnnnnnnnnnnnnnnnnnnnnnnnnnnnnnnnnnnnnnnnnnnnnnnnnnnnnnnnnnnnnnnnnnnnnnnnnnnnnnnnnnnnnnnnnnnnnnnnnnnnnnnnnnnnnnnnnnnnnnnnnnnnnnnnnnnnnnnnnnnnnnnnnnnnnnnnnnnnnnnnnnnnnnnnnnnnnnnnnnnnnnnnnnnnnnnnnnnnnnnnnnnnnnnnnnnnnnnnnnnnnnnnnnnnnnnnnnnnnnnnnnnnnnnnnnnnnnnnnnnnnnnnnnnnnnnnnnnnnnnnnnnnnnnnnnnnnnnnnnnnnnnnnnnnnnnnnnnnnnnnnnnnnnnnnnnnnnnnnnnnnnnnnnnnnnnnnnnnnnnnnnnnnnnnnnnnnnnnnnnnnnnnnnnnnnnnnnnnnnnnnnnnnnnnnnnnnnnnnnnnnnnnnnnnnnnnnnnnnnnnnnnnnnnnnnnnnnnnnnnnnnnnnnnnnnnnnnnnnnnnnnnnnnnnnnnnnnnnnnnnnnnnnnnnnnnnnnnnnnnnnnnnnnnnnnnnnnnnnnnnnnnnnnnnnnnnnnnnnnnnnnnnnnnnnnnnnnnnnnnnnnnnnnnnnnnnnnnnnnnnnnnnnnnnnnnnnnnnnnnnnnnnnnnnnnnnnnnnnnnnnnnnnnnnnnnnnnnnnnnnnnnnnnnnnnnnnnnnnnnnnnnnnnnnnnnnnnnnnnnnnnnnnnnnnnnnnnnnnnnnnnnnnnnnnnnnnnnnnnnnnnnnnnnnnnnnnnnnnnnnnnnnnnnnnnnnnnnnnnnnnnnnnnnnnnnnnnnnnnnnnnnnnnnnnnnnnnnnnnnnnnnnnnnnnnnnnnnnnnnnnnnnnnnnnnnnnnnnnnnnnnnnnnnnnnnnnnnnnnnnnnnnnnnnnnnnnnnnnnnnnnnnnnnnnnnnnnnnnnnnnnnnnnnnnnnnnnnnnnnnnnnnnnnnnnnnnnnnnnnnnnnnnnnnnnnnnnnnnnnnnnnnnnnnnnnnnnnnnnnnnnnnnnnnnnnnnnnnnnnnnnnnnnnnnnnnnnnnnnnnnnnnnnnnnnnnnnnnnnnnnnnnnnnnnnnnnnnnnnnnnnnnnnnnnnnnnnnnnnnnnnnnnnnnnnnnnnnnnnnnnnnnnnnnnnnnnnnnnnnnnnnnnnnnnnnnnnnnnnnnnnnnnnnnnnnnnnnnnnnnnnnnnnnnnnnnnnnnnnnnnnnnnnnnnnnnnnnnnnnnnnnnnnnnnnnnnnnnnnnnnnnnnnnnnnnnnnnnnnnnnnnnnnnnnnnnnnnnnnnnnnnnnnnnnnnnnnnnnnnnnnnnnnnnnnnnnnnnnnnnnnnnnnnnnnnnnnnnnnnnnnnnnnnnnnnnnnnnnnnnnnnnnnnnnnnnnnnnnnnnnnnnnnnnnnnnnnnnnnnnnnnnnnnnnnnnnnnnnnnnnnnnnnnnnnnnnnnnnnnnnnnnnnnnnnnnnnnnnnnnnnnnnnnnnnnnnnnnnnnnnnnnnnnnnnnnnnnnnnnnnnnnnnnnnnnnnnnnnnnnnnnnnnnnnnnnnnnnnnnnnnnnnnnnnnnnnnnnnnnnnnnnnnnnnnnnnnnnnnnnnnnnnnnnnnnnnnnnnnnnnnnnnnnnnnnnnnnnnnnnnnnnnnnnnnnnnnnnnnnnnnnnnnnnnnnnnnnnnnnnnnnnnnnnnnnnnnnnnnnnnnnnnnnnnnnnnnnnnnnnnnnnnnnnnnnnnnnnnnnnnnnnnnnnnnnnnnnnnnnnnnnnnnnnnnnnnnnnnnnnnnnnnnnnnnnnnnnnnnnnnnnnnnnnnnnnnnnnnnnnnnnnnnnnnnnnnnnnnnnnnnnnnnnnnnnnnnnnnnnnnnnnnnnnnnnnnnnnnnnnnnnnnnnnnnnnnnnnnnnnnnnnnnnnnnnnnnnnnnnnnnnnnnnnnnnnnnnnnnnnnnnnnnnnnnnnnnnnnnnnnnnnnnnnnnnnnnnnnnnnnnnnnnnnnnnnnnnnnnnnnnnnnnnnnnnnnnnnnnnnnnnnnnnnnnnnnnnnnnnnnnnnnnnnnnnnnnnnnnnnnnnnnnnnnnnnnnnnnnnnnnnnnnnnnnnnnnnnnnnnnnnnnnnnnnnnnnnnnnnnnnnnnnnnnnnnnnnnnnnnnnnnnnnnnnnnnnnnnnnnnnnnnnnnnnnnnnnnnnnnnnnnnnnnnnnnnnnnnnnnnnnnnnnnnnnnnnnnnnnnnnnnnnnnnnnnnnnnnnnnnnnnnnnnnnnnnnnnnnnnnnnnnnnnnnnnnnnnnnnnnnnnnnnnnnnnnnnnnnnnnnnnnnnnnnnnnnnnnnnnnnnnnnnnnnnnnnnnnnnnnnnnnnnnnnnnnnnnnnnnnnnnnnnnnnnnnnnnnnnnnnnnnnnnnnnnnnnnnnnnnnnnnnnnnnnnnnnnnnnnnnnnnnnnnnnnnnnnnnnnnnnnnnnnnnnnnnnnnnnnnnnnnnnnnnnnnnnnnnnnnnnnnnnnnnnnnnnnnnnnnnnnnnnnnnnnnnnnnnnnnnnnnnnnnnnnnnnnnnnnnnnnnnnnnnnnnnnnnnnnnnnnnnnnnnnnnnnnnnnnnnnnnnnnnnnnnnnnnnnnnnnnnnnnnnnnnnnnnnnnnnnnnnnnnnnnnnnnnnnnnnnnnnnnnnnnnnnnnnnnnnnnnnnnnnnnnnnnnnnnnnnnnnnnnnnnnnnnnnnnnnnnnnnnnnnnnnnnnnnnnnnnnnnnnnnnnnnnnnnnnnnnnnnnnnnnnnnnnnnnnnnnnnnnnnnnnnnnnnnnnnnnnnnnnnnnnnnnnnnnnnnnnnnnnnnnnnnnnnnnnnnnnnnnnnnnnnnnnnnnnnnnnnnnnnnnnnnnnnnnnnnnnnnnnnnnnnnnnnnnnnnnnnnnnnnnnnnnnnnnnnnnnnnnnnnnnnnnnnnnnnnnnnnnnnnnnnnnnnnnnnnnnnnnnnnnnnnnnnnnnnnnnnnnnnnnnnnnnnnnnnnnnnnnnnnnnnnnnnnnnnnnnnnnnnnnnnnnnnnnnnnnnnnnnnnnnnnnnnnnnnnnnnnnnnnnnnnnnnnnnnnnnnnnnnnnnnnnnnnnnnnnnnnnnnnnnnnnnnnnnnnnnnnnnnnnnnnnnnnnnnnnnnnnnnnnnnnnnnnnnnnnnnnnnnnnnnnnnnnnnnnnnnnnnnnnnnnnnnnnnnnnnnnnnnnnnnnnnnnnnnnnnnnnnnnnnnnnnnnnnnnnnnnnnnnnnnnnnnnnnnnnnnnnnnnnnnnnnnnnnnnnnnnnnnnnnnnnnnnnnnnnnnnnnnnnnnnnnnnnnnnnnnnnnnnnnnnnnnnnnnnnnnnnnnnnnnnnnnnnnnnnnnnnnnnnnnnnnnnnnnnnnnnnnnnnnnnnnnnnnnnnnnnnnnnnnnnnnnnnnnnnnnnnnnnnnnnnnnnnnnnnnnnnnnnnnnnnnnnnnnnnnnnnnnnnnnnnnnnnnnnnnnnnnnnnnnnnnnnnnnnnnnnnnnnnnnnnnnnnnnnnnnnnnnnnnnnnnnnnnnnnnnnnnnnnnnnnnnnnnnnnnnnnnnnnnnnnnnnnnnnnnnnnnnnnnnnnnnnnnnnnnnnnnnnnnnnnnnnnnnnnnnnnnnnnnnnnnnnnnnnnnnnnnnnnnnnnnnnnnnnnnnnnnnnnnnnnnnnnnnnnnnnnnnnnnnnnnnnnnnnnnnnnnnnnnnnnnnnnnnnnnnnnnnnnnnnnnnnnnnnnnnnnnnnnnnnnnnnnnnnnnnnnnnnnnnnnnnnnnnnnnnnnnnnnnnnnnnnnnnnnnnnnnnnnnnnnnnnnnnnnnnnnnnnnnnnnnnnnnnnnnnnnnnnnnnnnnnnnnnnnnnnnnnnnnnnnnnnnnnnnnnnnnnnnnnnnnnnnnnnnnnnnnnnnnnnnnnnnnnnnnnnnnnnnnnnnnnnnnnnnnnnnnnnnnnnnnnnnnnnnnnnnnnnnnnnnnnnnnnnnnnnnnnnnnnnnnnnnnnnnnnnnnnnnnnnnnnnnnnnnnnnnnnnnnnnnnnnnnnnnnnnnnnnnnnnnnnnnnnnnnnnnnnnnnnnnnnnnnnnnnnnnnnnnnnnnnnnnnnnnnnnnnnnnnnnnnnnnnnnnnnnnnnnnnnnnnnnnnnnnnnnnnnnnnnnnnnnnnnnnnnnnnnnnnnnnnnnnnnnnnnnnnnnnnnnnnnnnnnnnnnnnnnnnnnnnnnnnnnnnnnnnnnnnnnnnnnnnnnnnnnnnnnnnnnnnnnnnnnnnnnnnnnnnnnnnnnnnnnnnnnnnnnnnnnnnnnnnnnnnnnnnnnnnnnnnnnnnnnnnnnnnnnnnnnnnnnnnnnnnnnnnnnnnnnnnnnnnnnnnnnnnnnnnnnnnnnnnnnnnnnnnnnnnnnnnnnnnnnnnnnnnnnnnnnnnnnnnnnnnnnnnnnnnnnnnnnnnnnnnnnnnnnnnnnnnnnnnnnnnnnnnnnnnnnnnnnnnnnnnnnnnnnnnnnnnnnnnnnnnnnnnnnnnnnnnnnnnnnnnnnnnnnnnnnnnnnnnnnnnnnnnnnnnnnnnnnnnnnnnnnnnnnnnnnnnnnnnnnnnnnnnnnnnnnnnnnnnnnnnnnnnnnnnnnnnnnnnnnnnnnnnnnnnnnnnnnnnnnnnnnnnnnnnnnnnnnnnnnnnnnnnnnnnnnnnnnnnnnnnnnnnnnnnnnnnnnnnnnnnnnnnnnnnnnnnnnnnnnnnnnnnnnnnnnnnnnnnnnnnnnnnnnnnnnnnnnnnnnnnnnnnnnnnnnnnnnnnnnnnnnnnnnnnnnnnnnnnnnnnnnnnnnnnnnnnnnnnnnnnnnnnnnnnnnnnnnnnnnnnnnnnnnnnnnnnnnnnnnnnnnnnnnnnnnnnnnnnnnnnnnnnnnnnnnnnnnnnnnnnnnnnnnnnnnnnnnnnnnnnnnnnnnnnnnnnnnnnnnnnnnnnnnnnnnnnnnnnnnnnnnnnnnnnnnnnnnnnnnnnnnnnnnnnnnnnnnnnnnnnnnnnnnnnnnnnnnnnnnnnnnnnnnnnnnnnnnnnnnnnnnnnnnnnnnnnnnnnnnnnnnnnnnnnnnnnnnnnnnnnnnnnnnnnnnnnnnnnnnnnnnnnnnnnnnnnnnnnnnnnnnnnnnnnnnnnnnnnnnnnnnnnnnnnnnnnnnnnnnnnnnnnnnnnnnnnnnnnnnnnnnnnnnnnnnnnnnnnnnnnnnnnnnnnnnnnnnnnnnnnnnnnnnnnnnnnnnnnnnnnnnnnnnnnnnnnnnnnnnnnnnnnnnnnnnnnnnnnnnnnnnnnnnnnnnnnnnnnnnnnnnnnnnnnnnnnnnnnnnnnnnnnnnnnnnnnnnnnnnnnnnnnnnnnnnnnnnnnnnnnnnnnnnnnnnnnnnnnnnnnnnnnnnnnnnnnnnnnnnnnnnnnnnnnnnnnnnnnnnnnnnnnnnnnnnnnnnnnnnnnnnnnnnnnnnnnnnnnnnnnnnnnnnnnnnnnnnnnnnnnnnnnnnnnnnnnnnnnnnnnnnnnnnnnnnnnnnnnnnnnnnnnnnnnnnnnnnnnnnnnnnnnnnnnnnnnnnnnnnnnnnnnnnnnnnnnnnnnnnnnnnnnnnnnnnnnnnnnnnnnnnnnnnnnnnnnnnnnnnnnnnnnnnnnnnnnnnnnnnnnnnnnnnnnnnnnnnnnnnnnnnnnnnnnnnnnnnnnnnnnnnnnnnnnnnnnnnnnnnnnnnnnnnnnnnnnnnnnnnnnnnnnnnnnnnnnnnnnnnnnnnnnnnnnnnnnnnnnnnnnnnnnnnnnnnnnnnnnnnnnnnnnnnnnnnnnnnnnnnnnnnnnnnnnnnnnnnnnnnnnnnnnnnnnnnnnnnnnnnnnnnnnnnnnnnnnnnnnnnnnnnnnnnnnnnnnnnnnnnnnnnnnnnnnnnnnnnnnnnnnnnnnnnnnnnnnnnnnnnnnnnnnnnnnnnnnnnnnnnnnnnnnnnnnnnnnnnnnnnnnnnnnnnnnnnnnnnnnnnnnnnnnnnnnnnnnnnnnnnnnnnnnnnnnnnnnnnnnnnnnnnnnnnnnnnnnnnnnnnnnnnnnnnnnnnnnnnnnnnnnnnnnnnnnnnnnnnnnnnnnnnnnnnnnnnnnnnnnnnnnnnnnnnnnnnnnnnnnnnnnnnnnnnnnnnnnnnnnnnnnnnnnnnnnnnnnnnnnnnnnnnnnnnnnnnnnnnnnnnnnnnnnnnnnnnnnnnnnnnnnnnnnnnnnnnnnnnnnnnnnnnnnnnnnnnnnnnnnnnnnnnnnnnnnnnnnnnnnnnnnnnnnnnnnnnnnnnnnnnnnnnnnnnnnnnnnnnnnnnnnnnnnnnnnnnnnnnnnnnnnnnnnnnnnnnnnnnnnnnnnnnnnnnnnnnnnnnnnnnnnnnnnnnnnnnnnnnnnnnnnnnnnnnnnnnnnnnnnnnnnnnnnnnnnnnnnnnnnnnnnnnnnnnnnnnnnnnnnnnnnnnnnnnnnnnnnnnnnnnnnnnnnnnnnnnnnnnnnnnnnnnnnnnnnnnnnnnnnnnnnnnnnnnnnnnnnnnnnnnnnnnnnnnnnnnnnnnnnnnnnnnnnnnnnnnnnnnnnnnnnnnnnnnnnnnnnnnnnnnnnnnnnnnnnnnnnnnnnnnnnnnnnnnnnnnnnnnnnnnnnnnnnnnnnnnnnnnnnnnnnnnnnnnnnnnnnnnnnnnnnnnnnnnnnnnnnnnnnnnnnnnnnnnnnnnnnnnnnnnnnnnnnnnnnnnnnnnnnnnnnnnnnnnnnnnnnnnnnnnnnnnnnnnnnnnnnnnnnnnnnnnnnnnnnnnnnnnnnnnnnnnnnnnnnnnnnnnnnnnnnnnnnnnnnnnnnnnnnnnnnnnnnnnnnnnnnnnnnnnnnnnnnnnnnnnnnnnnnnnnnnnnnnnnnnnnnnnnnnnnnnnnnnnnnnnnnnnnnnnnnnnnnnnnnnnnnnnnnnnnnnnnnnnnnnnnnnnnnnnnnnnnnnnnnnnnnnnnnnnnnnnnnnnnnnnnnnnnnnnnnnnnnnnnnnnnnnnnnnnnnnnnnnnnnnnnnnnnnnnnnnnnnnnnnnnnnnnnnnnnnnnnnnnnnnnnnnnnnnnnnnnnnnnnnnnnnnnnnnnnnnnnnnnnnnnnnnnnnnnnnnnnnnnnnnnnnnnnnnnnnnnnnnnnnnnnnnnnnnnnnnnnnnnnnnnnnnnnnnnnnnnnnnnnnnnnnnnnnnnnnnnnnnnnnnnnnnnnnnnnnnnnnnnnnnnnnnnnnnnnnnnnnnnnnnnnnnnnnnnnnnnnnnnnnnnnnnnnnnnnnnnnnnnnnnnnnnnnnnnnnnnnnnnnnnnnnnnnnnnnnnnnnnnnnnnnnnnnnnnnnnnnnnnnnnnnnnnnnnnnnnnnnnnnnnnnnnnnnnnnnnnnnnnnnnnnnnnnnnnnnnnnnnnnnnnnnnnnnnnnnnnnnnnnnnnnnnnnnnnnnnnnnnnnnnnnnnnnnnnnnnnnnnnnnnnnnnnnnnnnnnnnnnnnnnnnnnnnnnnnnnnnnnnnnnnnnnnnnnnnnnnnnnnnnnnnnnnnnnnnnnnnnnnnnnnnnnnnnnnnnnnnnnnnnnnnnnnnnnnnnnnnnnnnnnnnnnnnnnnnnnnnnnnnnnnnnnnnnnnnnnnnnnnnnnnnnnnnnnnnnnnnnnnnnnnnnnnnnnnnnnnnnnnnnnnnnnnnnnnnnnnnnnnnnnnnnnnnnnnnnnnnnnnnnnnnnnnnnnnnnnnnnnnnnnnnnnnnnnnnnnnnnnnnnnnnnnnnnnnnnnnnnnnnnnnnnnnnnnnnnnnnnnnnnnnnnnnnnnnnnnnnnnnnnnnnnnnnnnnnnnnnnnnnnnnnnnnnnnnnnnnnnnnnnnnnnnnnnnnnnnnnnnnnnnnnnnnnnnnnnnnnnnnnnnnnnnnnnnnnnnnnnnnnnnnnnnnnnnnnnnnnnnnnnnnnnnnnnnnnnnnnnnnnnnnnnnnnnnnnnnnnnnnnnnnnnnnnnnnnnnnnnnnnnnnnnnnnnnnnnnnnnnnnnnnnnnnnnnnnnnnnnnnnnnnnnnnnnnnnnnnnnnnnnnnnnnnnnnnnnnnnnnnnnnnnnnnnnnnnnnnnnnnnnnnnnnnnnnnnnnnnnnnnnnnnnnnnnnnnnnnnnnnnnnnnnnnnnnnnnnnnnnnnnnnnnnnnnnnnnnnnnnnnnnnnnnnnnnnnnnnnnnnnnnnnnnnnnnnnnnnnnnnnnnnnnnnnnnnnnnnnnnnnnnnnnnnnnnnnnnnnnnnnnnnnnnnnnnnnnnnnnnnnnnnnnnnnnnnnnnnnnnnnnnnnnnnnnnnnnnnnnnnnnnnnnnnnnnnnnnnnnnnnnnnnnnnnnnnnnnnnnnnnnnnnnnnnnnnnnnnnnnnnnnnnnnnnnnnnnnnnnnnnnnnnnnnnnnnnnnnnnnnnnnnnnnnnnnnnnnnnnnnnnnnnnnnnnnnnnnnnnnnnnnnnnnnnnnnnnnnnnnnnnnnnnnnnnnnnnnnnnnnnnnnnnnnnnnnnnnnnnnnnnnnnnnnnnnnnnnnnnnnnnnnnnnnnnnnnnnnnnnnnnnnnnnnnnnnnnnnnnnnnnnnnnnnnnnnnnnnnnnnnnnnnnnnnnnnnnnnnnnnnnnnnnnnnnnnnnnnnnnnnnnnnnnnnnnnnnnnnnnnnnnnnnnnnnnnnnnnnnnnnnnnnnnnnnnnnnnnnnnnnnnnnnnnnnnnnnnnnnnnnnnnnnnnnnnnnnnnnnnnnnnnnnnnnnnnnnnnnnnnnnnnnnnnnnnnnnnnnnnnnnnnnnnnnnnnnnnnnnnnnnnnnnnnnnnnnnnnnnnnnnnnnnnnnnnnnnnnnnnnnnnnnnnnnnnnnnnnnnnnnnnnnnnnnnnnnnnnnnnnnnnnnnnnnnnnnnnnnnnnnnnnnnnnnnnnnnnnnnnnnnnnnnnnnnnnnnnnnnnnnnnnnnnnnnnnnnnnnnnnnnnnnnnnnnnnnnnnnnnnnnnnnnnnnnnnnnnnnnnnnnnnnnnnnnnnnnnnnnnnnnnnnnnnnnnnnnnnnnnnnnnnnnnnnnnnnnnnnnnnnnnnnnnnnnnnnnnnnnnnnnnnnnnnnnnnnnnnnnnnnnnnnnnnnnnnnnnnnnnnnnnnnnnnnnnnnnnnnnnnnnnnnnnnnnnnnnnnnnnnnnnnnnnnnnnnnnnnnnnnnnnnnnnnnnnnnnnnnnnnnnnnnnnnnnnnnnnnnnnnnnnnnnnnnnnnnnnnnnnnnnnnnnnnnnnnnnnnnnnnnnnnnnnnnnnnnnnnnnnnnnnnnnnnnnnnnnnnnnnnnnnnnnnnnnnnnnnnnnnnnnnnnnnnnnnnnnnnnnnnnnnnnnnnnnnnnnnnnnnnnnnnnnnnnnnnnnnnnnnnnnnnnnnnnnnnnnnnnnnnnnnnnnnnnnnnnnnnnnnnnnnnnnnnnnnnnnnnnnnnnnnnnnnnnnnnnnnnnnnnnnnnnnnnnnnnnnnnnnnnnnnnnnnnnnnnnnnnnnnnnnnnnnnnnnnnnnnnnnnnnnnnnnnnnnnnnnnnnnnnnnnnnnnnnnnnnnnnnnnnnnnnnnnnnnnnnnnnnnnnnnnnnnnnnnnnnnnnnnnnnnnnnnnnnnnnnnnnnnnnnnnnnnnnnnnnnnnnnnnnnnnnnnnnnnnnnnnnnnnnnnnnnnnnnnnnnnnnnnnnnnnnnnnnnnnnnnnnnnnnnnnnnnnnnnnnnnnnnnnnnnnnnnnnnnnnnnnnnnnnnnnnnnnnnnnnnnnnnnnnnnnnnnnnnnnnnnnnnnnnnnnnnnnnnnnnnnnnnnnnnnnnnnnnnnnnnnnnnnnnnnnnnnnnnnnnnnnnnnnnnnnnnnnnnnnnnnnnnnnnnnnnnnnnnnnnnnnnnnnnnnnnnnnnnnnnnnnnnnnnnnnnnnnnnnnnnnnnnnnnnnnnnnnnnnnnnnnnnnnnnnnnnnnnnnnnnnnnnnnnnnnnnnnnnnnnnnnnnnnnnnnnnnnnnnnnnnnnnnnnnnnnnnnnnnnnnnnnnnnnnnnnnnnnnnnnnnnnnnnnnnnnnnnnnnnnnnnnnnnnnnnnnnnnnnnnnnnnnnnnnnnnnnnnnnnnnnnnnnnnnnnnnnnnnnnnnnnnnnnnnnnnnnnnnnnnnnnnnnnnnnnnnnnnnnnnnnnnnnnnnnnnnnnnnnnnnnnnnnnnnnnnnnnnnnnnnnnnnnnnnnnnnnnnnnnnnnnnnnnnnnnnnnnnnnnnnnnnnnnnnnnnnnnnnnnnnnnnnnnnnnnnnnnnnnnnnnnnnnnnnnnnnnnnnnnnnnnnnnnnnnnnnnnnnnnnnnnnnnnnnnnnnnnnnnnnnnnnnnnnnnnnnnnnnnnnnnnnnnnnnnnnnnnnnnnnnnnnnnnnnnnnnnnnnnnnnnnnnnnnnnnnnnnnnnnnnnnnnnnnnnnnnnnnnnnnnnnnnnnnnnnnnnnnnnnnnnnnnnnnnnnnnnnnnnnnnnnnnnnnnnnnnnnnnnnnnnnnnnnnnnnnnnnnnnnnnnnnnnnnnnnnnnnnnnnnnnnnnnnnnnnnnnnnnnnnnnnnnnnnnnnnnnnnnnnnnnnnnnnnnnnnnnnnnnnnnnnnnnnnnnnnnnnnnnnnnnnnnnnnnnnnnnnnnnnnnnnnnnnnnnnnnnnnnnnnnnnnnnnnnnnnnnnnnnnnnnnnnnnnnnnnnnnnnnnnnnnnnnnnnnnnnnnnnnnnnnnnnnnnnnnnnnnnnnnnnnnnnnnnnnnnnnnnnnnnnnnnnnnnnnnnnnnnnnnnnnnnnnnnnnnnnnnnnnnnnnnnnnnnnnnnnnnnnnnnnnnnnnnnnnnnnnnnnnnnnnnnnnnnnnnnnnnnnnnnnnnnnnnnnnnnnnnnnnnnnnnnnnnnnnnnnnnnnnnnnnnnnnnnnnnnnnnnnnnnnnnnnnnnnnnnnnnnnnnnnnnnnnnnnnnnnnnnnnnnnnnnnnnnnnnnnnnnnnnnnnnnnnnnnnnnnnnnnnnnnnnnnnnnnnnnnnnnnnnnnnnnnnnnnnnnnnnnnnnnnnnnnnnnnnnnnnnnnnnnnnnnnnnnnnnnnnnnnnnnnnnnnnnnnnnnnnnnnnnnnnnnnnnnnnnnnnnnnnnnnnnnnnnnnnnnnnnnnnnnnnnnnnnnnnnnnnnnnnnnnnnnnnnnnnnnnnnnnnnnnnnnnnnnnnnnnnnnnnnnnnnnnnnnnnnnnnnnnnnnnnnnnnnnnnnnnnnnnnnnnnnnnnnnnnnnnnnnnnnnnnnnnnnnnnnnnnnnnnnnnnnnnnnnnnnnnnnnnnnnnnnnnnnnnnnnnnnnnnnnnnnnnnnnnnnnnnnnnnnnnnnnnnnnnnnnnnnnnnnnnnnnnnnnnnnnnnnnnnnnnnnnnnnnnnnnnnnnnnnnnnnnnnnnnnnnnnnnnnnnnnnnnnnnnnnnnnnnnnnnnnnnnnnnnnnnnnnnnnnnnnnnnnnnnnnnnnnnnnnnnnnnnnnnnnnnnnnnnnnnnnnnnnnnnnnnnnnnnnnnnnnnnnnnnnnnnnnnnnnnnnnnnnnnnnnnnnnnnnnnnnnnnnnnnnnnnnnnnnnnnnnnnnnnnnnnnnnnnnnnnnnnnnnnnnnnnnnnnnnnnnnnnnnnnnnnnnnnnnnnnnnnnnnnnnnnnnnnnnnnnnnnnnnnnnnnnnnnnnnnnnnnnnnnnnnnnnnnnnnnnnnnnnnnnnnnnnnnnnnnnnnnnnnnnnnnnnnnnnnnnnnnnnnnnnnnnnnnnnnnnnnnnnnnnnnnnnnnnnnnnnnnnnnnnnnnnnnnnnnnnnnnnnnnnnnnnnnnnnnnnnnnnnnnnnnnnnnnnnnnnnnnnnnnnnnnnnnnnnnnnnnnnnnnnnnnnnnnnnnnnnnnnnnnnnnnnnnnnnnnnnnnnnnnnnnnnnnnnnnnnnnnnnnnnnnnnnnnnnnnnnnnnnnnnnnnnnnnnnnnnnnnnnnnnnnnnnnnnnnnnnnnnnnnnnnnnnnnnnnnnnnnnnnnnnnnnnnnnnnnnnnnnnnnnnnnnnnnnnnnnnnnnnnnnnnnnnnnnnnnnnnnnnnnnnnnnnnnnnnnnnnnnnnnnnnnnnnnnnnnnnnnnnnnnnnnnnnnnnnnnnnnnnnnnnnnnnnnnnnnnnnnnnnnnnnnnnnnnnnnnnnnnnnnnnnnnnnnnnnnnnnnnnnnnnnnnnnnnnnnnnnnnnnnnnnnnnnnnnnnnnnnnnnnnnnnnnnnnnnnnnnnnnnnnnnnnnnnnnnnnnnnnnnnnnnnnnnnnnnnnnnnnnnnnnnnnnnnnnnnnnnnnnnnnnnnnnnnnnnnnnnnnnnnnnnnnnnnnnnnnnnnnnnnnnnnnnnnnnnnnnnnnnnnnnnnnnnnnnnnnnnnnnnnnnnnnnnnnnnnnnnnnnnnnnnnnnnnnnnnnnnnnnnnnnnnnnnnnnnnnnnnnnnnnnnnnnnnnnnnnnnnnnnnnnnnnnnnnnnnnnnnnnnnnnnnnnnnnnnnnnnnnnnnnnnnnnnnnnnnnnnnnnnnnnnnnnnnnnnnnnnnnnnnnnnnnnnnnnnnnnnnnnnnnnnnnnnnnnnnnnnnnnnnnnnnnnnnnnnnnnnnnnnnnnnnnnnnnnnnnnnnnnnnnnnnnnnnnnnnnnnnnnnnnnnnnnnnnnnnnnnnnnnnnnnnnnnnnnnnnnnnnnnnnnnnnnnnnnnnnnnnnnnnnnnnnnnnnnnnnnnnnnnnnnnnnnnnnnnnnnnnnnnnnnnnnnnnnnnnnnnnnnnnnnnnnnnnnnnnnnnnnnnnnnnnnnnnnnnnnnnnnnnnnnnnnnnnnnnnnnnnnnnnnnnnnnnnnnnnnnnnnnnnnnnnnnnnnnnnnnnnnnnnnnnnnnnnnnnnnnnnnnnnnnnnnnnnnnnnnnnnnnnnnnnnnnnnnnnnnnnnnnnnnnnnnnnnnnnnnnnnnnnnnnnnnnnnnnnnnnnnnnnnnnnnnnnnnnnnnnnnnnnnnnnnnnnnnnnnnnnnnnnnnnnnnnnnnnnnnnnnnnnnnnnnnnnnnnnnnnnnnnnnnnnnnnnnnnnnnnnnnnnnnnnnnnnnnnnnnnnnnnnnnnnnnnnnnnnnnnnnnnnnnnnnnnnnnnnnnnnnnnnnnnnnnnnnnnnnnnnnnnnnnnnnnnnnnnnnnnnnnnnnnnnnnnnnnnnnnnnnnnnnnnnnnnnnnnnnnnnnnnnnnnnnnnnnnnnnnnnnnnnnnnnnnnnnnnnnnnnnnnnnnnnnnnnnnnnnnnnnnnnnnnnnnnnnnnnnnnnnnnnnnnnnnnnnnnnnnnnnnnnnnnnnnnnnnnnnnnnnnnnnnnnnnnnnnnnnnnnnnnnnnnnnnnnnnnnnnnnnnnnnnnnnnnnnnnnnnnnnnnnnnnnnnnnnnnnnnnnnnnnnnnnnnnnnnnnnnnnnnnnnnnnnnnnnnnnnnnnnnnnnnnnnnnnnnnnnnnnnnnnnnnnnnnnnnnnnnnnnnnnnnnnnnnnnnnnnnnnnnnnnnnnnnnnnnnnnnnnnnnnnnnnnnnnnnnnnnnnnnnnnnnnnnnnnnnnnnnnnnnnnnnnnnnnnnnnnnnnnnnnnnnnnnnnnnnnnnnnnnnnnnnnnnnnnnnnnnnnnnnnnnnnnnnnnnnnnnnnnnnnnnnnnnnnnnnnnnnnnnnnnnnnnnnnnnnnnnnnnnnnnnnnnnnnnnnnnnnnnnnnnnnnnnnnnnnnnnnnnnnnnnnnnnnnnnnnnnnnnnnnnnnnnnnnnnnnnnnnnnnnnnnnnnnnnnnnnnnnnnnnnnnnnnnnnnnnnnnnnnnnnnnnnnnnnnnnnnnnnnnnnnnnnnnnnnnnnnnnnnnnnnnnnnnnnnnnnnnnnnnnnnnnnnnnnnnnnnnnnnnnnnnnnnnnnnnnnnnnnnnnnnnnnnnnnnnnnnnnnnnnnnnnnnnnnnnnnnnnnnnnnnnnnnnnnnnnnnnnnnnnnnnnnnnnnnnnnnnnnnnnnnnnnnnnnnnnnnnnnnnnnnnnnnnnnnnnnnnnnnnnnnnnnnnnnnnnnnnnnnnnnnnnnnnnnnnnnnnnnnnnnnnnnnnnnnnnnnnnnnnnnnnnnnnnnnnnnnnnnnnnnnnnnnnnnnnnnnnnnnnnnnnnnnnnnnnnnnnnnnnnnnnnnnnnnnnnnnnnnnnnnnnnnnnnnnnnnnnnnnnnnnnnnnnnnnnnnnnnnnnnnnnnnnnnnnnnnnnnnnnnnnnnnnnnnnnnnnnnnnnnnnnnnnnnnnnnnnnnnnnnnnnnnnnnnnnnnnnnnnnnnnnnnnnnnnnnnnnnnnnnnnnnnnnnnnnnnnnnnnnnnnnnnnnnnnnnnnnnnnnnnnnnnnnnnnnnnnnnnnnnnnnnnnnnnnnnnnnnnnnnnnnnnnnnnnnnnnnnnnnnnnnnnnnnnnnnnnnnnnnnnnnnnnnnnnnnnnnnnnnnnnnnnnnnnnnnnnnnnnnnnnnnnnnnnnnnnnnnnnnnnnnnnnnnnnnnnnnnnnnnnnnnnnnnnnnnnnnnnnnnnnnnnnnnnnnnnnnnnnnnnnnnnnnnnnnnnnnnnnnnnnnnnnnnnnnnnnnnnnnnnnnnnnnnnnnnnnnnnnnnnnnnnnnnnnnnnnnnnnnnnnnnnnnnnnnnnnnnnnnnnnnnnnnnnnnnnnnnnnnnnnnnnnnnnnnnnnnnnnnnnnnnnnnnnnnnnnnnnnnnnnnnnnnnnnnnnnnnnnnnnnnnnnnnnnnnnnnnnnnnnnnnnnnnnnnnnnnnnnnnnnnnnnnnnnnnnnnnnnnnnnnnnnnnnnnnnnnnnnnnnnnnnnnnnnnnnnnnnnnnnnnnnnnnnnnnnnnnnnnnnnnnnnnnnnnnnnnnnnnnnnnnnnnnnnnnnnnnnnnnnnnnnnnnnnnnnnnnnnnnnnnnnnnnnnnnnnnnnnnnnnnnnnnnnnnnnnnnnnnnnnnnnnnnnnnnnnnnnnnnnnnnnnnnnnnnnnnnnnnnnnnnnnnnnnnnnnnnnnnnnnnnnnnnnnnnnnnnnnnnnnnnnnnnnnnnnnnnnnnnnnnnnnnnnnnnnnnnnnnnnnnnnnnnnnnnnnnnnnnnnnnnnnnnnnnnnnnnnnnnnnnnnnnnnnnnnnnnnnnnnnnnnnnnnnnnnnnnnnnnnnnnnnnnnnnnnnnnnnnnnnnnnnnnnnnnnnnnnnnnnnnnnnnnnnnnnnnnnnnnnnnnnnnnnnnnnnnnnnnnnnnnnnnnnnnnnnnnnnnnnnnnnnnnnnnnnnnnnnnnnnnnnnnnnnnnnnnnnnnnnnnnnnnnnnnnnnnnnnnnnnnnnnnnnnnnnnnnnnnnnnnnnnnnnnnnnnnnnnnnnnnnnnnnnnnnnnnnnnnnnnnnnnnnnnnnnnnnnnnnnnnnnnnnnnnnnnnnnnnnnnnnnnnnnnnnnnnnnnnnnnnnnnnnnnnnnnnnnnnnnnnnnnnnnnnnnnnnnnnnnnnnnnnnnnnnnnnnnnnnnnnnnnnnnnnnnnnnnnnnnnnnnnnnnnnnnnnnnnnnnnnnnnnnnnnnnnnnnnnnnnnnnnnnnnnnnnnnnnnnnnnnnnnnnnnnnnnnnnnnnnnnnnnnnnnnnnnnnnnnnnnnnnnnnnnnnnnnnnnnnnnnnnnnnnnnnnnnnnnnnnnnnnnnnnnnnnnnnnnnnnnnnnnnnnnnnnnnnnnnnnnnnnnnnnnnnnnnnnnnnnnnnnnnnnnnnnnnnnnnnnnnnnnnnnnnnnnnnnnnnnnnnnnnnnnnnnnnnnnnnnnnnnnnnnnnnnnnnnnnnnnnnnnnnnnnnnnnnnnnnnnnnnnnnnnnnnnnnnnnnnnnnnnnnnnnnnnnnnnnnnnnnnnnnnnnnnnnnnnnnnnnnnnnnnnnnnnnnnnnnnnnnnnnnnnnnnnnnnnnnnnnnnnnnnnnnnnnnnnnnnnnnnnnnnnnnnnnnnnnnnnnnnnnnnnnnnnnnnnnnnnnnnnnnnnnnnnnnnnnnnnnnnnnnnnnnnnnnnnnnnnnnnnnnnnnnnnnnnnnnnnnnnnnnnnnnnnnnnnnnnnnnnnnnnnnnnnnnnnnnnnnnnnnnnnnnnnnnnnnnnnnnnnnnnnnnnnnnnnnnnnnnnnnnnnnnnnnnnnnnnnnnnnnnnnnnnnnnnnnnnnnnnnnnnnnnnnnnnnnnnnnnnnnnnnnnnnnnnnnnnnnnnnnnnnnnnnnnnnnnnnnnnnnnnnnnnnnnnnnnnnnnnnnnnnnnnnnnnnnnnnnnnnnnnnnnnnnnnnnnnnnnnnnnnnnnnnnnnnnnnnnnnnnnnnnnnnnnnnnnnnnnnnnnnnnnnnnnnnnnnnnnnnnnnnnnnnnnnnnnnnnnnnnnnnnnnnnnnnnnnnnnnnnnnnnnnnnnnnnnnnnnnnnnnnnnnnnnnnnnnnnnnnnnnnnnnnnnnnnnnnnnnnnnnnnnnnnnnnnnnnnnnnnnnnnnnnnnnnnnnnnnnnnnnnnnnnnnnnnnnnnnnnnnnnnnnnnnnnnnnnnnnnnnnnnnnnnnnnnnnnnnnnnnnnnnnnnnnnnnnnnnnnnnnnnnnnnnnnnnnnnnnnnnnnnnnnnnnnnnnnnnnnnnnnnnnnnnnnnnnnnnnnnnnnnnnnnnnnnnnnnnnnnnnnnnnnnnnnnnnnnnnnnnnnnnnnnnnnnnnnnnnnnnnnnnnnnnnnnnnnnnnnnnnnnnnnnnnnnnnnnnnnnnnnnnnnnnnnnnnnnnnnnnnnnnnnnnnnnnnnnnnnnnnnnnnnnnnnnnnnnnnnnnnnnnnnnnnnnnnnnnnnnnnnnnnnnnnnnnnnnnnnnnnnnnnnnnnnnnnnnnnnnnnnnnnnnnnnnnnnnnnnnnnnnnnnnnnnnnnnnnnnnnnnnnnnnnnnnnnnnnnnnnnnnnnnnnnnnnnnnnnnnnnnnnnnnnnnnnnnnnnnnnnnnnnnnnnnnnnnnnnnnnnnnnnnnnnnnnnnnnnnnnnnnnnnnnnnnnnnnnnnnnnnnnnnnnnnnnnnnnnnnnnnnnnnnnnnnnnnnnnnnnnnnnnnnnnnnnnnnnnnnnnnnnnnnnnnnnnnnnnnnnnnnnnnnnnnnnnnnnnnnnnnnnnnnnnnnnnnnnnnnnnnnnnnnnnnnnnnnnnnnnnnnnnnnnnnnnnnnnnnnnnnnnnnnnnnnnnnnnnnnnnnnnnnnnnnnnnnnnnnnnnnnnnnnnnnnnnnnnnnnnnnnnnnnnnnnnnnnnnnnnnnnnnnnnnnnnnnnnnnnnnnnnnnnnnnnnnnnnnnnnnnnnnnnnnnnnnnnnnnnnnnnnnnnnnnnnnnnnnnnnnnnnnnnnnnnnnnnnnnnnnnnnnnnnnnnnnnnnnnnnnnnnnnnnnnnnnnnnnnnnnnnnnnnnnnnnnnnnnnnnnnnnnnnnnnnnnnnnnnnnnnnnnnnnnnnnnnnnnnnnnnnnnnnnnnnnnnnnnnnnnnnnnnnnnnnnnnnnnnnnnnnnnnnnnnnnnnnnnnnnnnnnnnnnnnnnnnnnnnnnnnnnnnnnnnnnnnnnnnnnnnnnnnnnnnnnnnnnnnnnnnnnnnnnnnnnnnnnnnnnnnnnnnnnnnnnnnnnnnnnnnnnnnnnnnnnnnnnnnnnnnnnnnnnnnnnnnnnnnnnnnnnnnnnnnnnnnnnnnnnnnnnnnnnnnnnnnnnnnnnnnnnnnnnnnnnnnnnnnnnnnnnnnnnnnnnnnnnnnnnnnnnnnnnnnnnnnnnnnnnnnnnnnnnnnnnnnnnnnnnnnnnnnnnnnnnnnnnnnnnnnnnnnnnnnnnnnnnnnnnnnnnnnnnnnnnnnnnnnnnnnnnnnnnnnnnnnnnnnnnnnnnnnnnnnnnnnnnnnnnnnnnnnnnnnnnnnnnnnnnnnnnnnnnnnnnnnnnnnnnnnnnnnnnnnnnnnnnnnnnnnnnnnnnnnnnnnnnnnnnnnnnnnnnnnnnnnnnnnnnnnnnnnnnnnnnnnnnnnnnnnnnnnnnnnnnnnnnnnnnnnnnnnnnnnnnnnnnnnnnnnnnnnnnnnnnnnnnnnnnnnnnnnnnnnnnnnnnnnnnnnnnnnnnnnnnnnnnnnnnnnnnnnnnnnnnnnnnnnnnnnnnnnnnnnnnnnnnnnnnnnnnnnnnnnnnnnnnnnnnnnnnnnnnnnnnnnnnnnnnnnnnnnnnnnnnnnnnnnnnnnnnnnnnnnnnnnnnnnnnnnnnnnnnnnnnnnnnnnnnnnnnnnnnnnnnnnnnnnnnnnnnnnnnnnnnnnnnnnnnnnnnnnnnnnnnnnnnnnnnnnnnnnnnnnnnnnnnnnnnnnnnnnnnnnnnnnnnnnnnnnnnnnnnnnnnnnnnnnnnnnnnnnnnnnnnnnnnnnnnnnnnnnnnnnnnnnnnnnnnnnnnnnnnnnnnnnnnnnnnnnnnnnnnnnnnnnnnnnnnnnnnnnnnnnnnnnnnnnnnnnnnnnnnnnnnnnnnnnnnnnnnnnnnnnnnnnnnnnnnnnnnnnnnnnnnnnnnnnnnnnnnnnnnnnnnnnnnnnnnnnnnnnnnnnnnnnnnnnnnnnnnnnnnnnnnnnnnnnnnnnnnnnnnnnnnnnnnnnnnnnnnnnnnnnnnnnnnnnnnnnnnnnnnnnnnnnnnnnnnnnnnnnnnnnnnnnnnnnnnnnnnnnnnnnnnnnnnnnnnnnnnnnnnnnnnnnnnnnnnnnnnnnnnnnnnnnnnnnnnnnnnnnnnnnnnnnnnnnnnnnnnnnnnnnnnnnnnnnnnnnnnnnnnnnnnnnnnnnnnnnnnnnnnnnnnnnnnnnnnnnnnnnnnnnnnnnnnnnnnnnnnnnnnnnnnnnnnnnnnnnnnnnnnnnnnnnnnnnnnnnnnnnnnnnnnnnnnnnnnnnnnnnnnnnnnnnnnnnnnnnnnnnnnnnnnnnnnnnnnnnnnnnnnnnnnnnnnnnnnnnnnnnnnnnnnnnnnnnnnnnnnnnnnnnnnnnnnnnnnnnnnnnnnnnnnnnnnnnnnnnnnnnnnnnnnnnnnnnnnnnnnnnnnnnnnnnnnnnnnnnnnnnnnnnnnnnnnnnnnnnnnnnnnnnnnnnnnnnnnnnnnnnnnnnnnnnnnnnnnnnnnnnnnnnnnnnnnnnnnnnnnnnnnnnnnnnnnnnnnnnnnnnnnnnnnnnnnnnnnnnnnnnnnnnnnnnnnnnnnnnnnnnnnnnnnnnnnnnnnnnnnnnnnnnnnnnnnnnnnnnnnnnnnnnnnnnnnnnnnnnnnnnnnnnnnnnnnnnnnnnnnnnnnnnnnnnnnnnnnnnnnnnnnnnnnnnnnnnnnnnnnnnnnnnnnnnnnnnnnnnnnnnnnnnnnnnnnnnnnnnnnnnnnnnnnnnnnnnnnnnnnnnnnnnnnnnnnnnnnnnnnnnnnnnnnnnnnnnnnnnnnnnnnnnnnnnnnnnnnnnnnnnnnnnnnnnnnnnnnnnnnnnnnnnnnnnnnnnnnnnnnnnnnnnnnnnnnnnnnnnnnnnnnnnnnnnnnnnnnnnnnnnnnnnnnnnnnnnnnnnnnnnnnnnnnnnnnnnnnnnnnnnnnnnnnnnnnnnnnnnnnnnnnnnnnnnnnnnnnnnnnnnnnnnnnnnnnnnnnnnnnnnnnnnnnnnnnnnnnnnnnnnnnnnnnnnnnnnnnnnnnnnnnnnnnnnnnnnnnnnnnnnnnnnnnnnnnnnnnnnnnnnnnnnnnnnnnnnnnnnnnnnnnnnnnnnnnnnnnnnnnnnnnnnnnnnnnnnnnnnnnnnnnnnnnnnnnnnnnnnnnnnnnnnnnnnnnnnnnnnnnnnnnnnnnnnnnnnnnnnnnnnnnnnnnnnnnnnnnnnnnnnnnnnnnnnnnnnnnnnnnnnnnnnnnnnnnnnnnnnnnnnnnnnnnnnnnnnnnnnnnnnnnnnnnnnnnnnnnnnnnnnnnnnnnnnnnnnnnnnnnnnnnnnnnnnnnnnnnnnnnnnnnnnnnnnnnnnnnnnnnnnnnnnnnnnnnnnnnnnnnnnnnnnnnnnnnnnnnnnnnnnnnnnnnnnnnnnnnnnnnnnnnnnnnnnnnnnnnnnnnnnnnnnnnnnnnnnnnnnnnnnnnnnnnnnnnnnnnnnnnnnnnnnnnnnnnnnnnnnnnnnnnnnnnnnnnnnnnnnnnnnnnnnnnnnnnnnnnnnnnnnnnnnnnnnnnnnnnnnnnnnnnnnnnnnnnnnnnnnnnnnnnnnnnnnnnnnnnnnnnnnnnnnnnnnnnnnnnnnnnnnnnnnnnnnnnnnnnnnnnnnnnnnnnnnnnnnnnnnnnnnnnnnnnnnnnnnnnnnnnnnnnnnnnnnnnnnnnnnnnnnnnnnnnnnnnnnnnnnnnnnnnnnnnnnnnnnnnnnnnnnnnnnnnnnnnnnnnnnnnnnnnnnnnnnnnnnnnnnnnnnnnnnnnnnnnnnnnnnnnnnnnnnnnnnnnnnnnnnnnnnnnnnnnnnnnnnnnnnnnnnnnnnnnnnnnnnnnnnnnnnnnnnnnnnnnnnnnnnnnnnnnnnnnnnnnnnnnnnnnnnnnnnnnnnnnnnnnnnnnnnnnnnnnnnnnnnnnnnnnnnnnnnnnnnnnnnnnnnnnnnnnnnnnnnnnnnnnnnnnnnnnnnnnnnnnnnnnnnnnnnnnnnnnnnnnnnnnnnnnnnnnnnnnnnnnnnnnnnnnnnnnnnnnnnnnnnnnnnnnnnnnnnnnnnnnnnnnnnnnnnnnnnnnnnnnnnnnnnnnnnnnnnnnnnnnnnnnnnnnnnnnnnnnnnnnnnnnnnnnnnnnnnnnnnnnnnnnnnnnnnnnnnnnnnnnnnnnnnnnnnnnnnnnnnnnnnnnnnnnnnnnnnnnnnnnnnnnnnnnnnnnnnnnnnnnnnnnnnnnnnnnnnnnnnnnnnnnnnnnnnnnnnnnnnnnnnnnnnnnnnnnnnnnnnnnnnnnnnnnnnnnnnnnnnnnnnnnnnnnnnnnnnnnnnnnnnnnnnnnnnnnnnnnnnnnnnnnnnnnnnnnnnnnnnnnnnnnnnnnnnnnnnnnnnnnnnnnnnnnnnnnnnnnnnnnnnnnnnnnnnnnnnnnnnnnnnnnnnnnnnnnnnnnnnnnnnnnnnnnnnnnnnnnnnnnnnnnnnnnnnnnnnnnnnnnnnnnnnnnnnnnnnnnnnnnnnnnnnnnnnnnnnnnnnnnnnnnnnnnnnnnnnnnnnnnnnnnnnnnnnnnnnnnnnnnnnnnnnnnnnnnnnnnnnnnnnnnnnnnnnnnnnnnnnnnnnnnnnnnnnnnnnnnnnnnnnnnnnnnnnnnnnnnnnnnnnnnnnnnnnnnnnnnnnnnnnnnnnnnnnnnnnnnnnnnnnnnnnnnnnnnnnnnnnnnnnnnnnnnnnnnnnnnnnnnnnnnnnnnnnnnnnnnnnnnnnnnnnnnnnnnnnnnnnnnnnnnnnnnnnnnnnnnnnnnnnnnnnnnnnnnnnnnnnnnnnnnnnnnnnnnnnnnnnnnnnnnnnnnnnnnnnnnnnnnnnnnnnnnnnnnnnnnnnnnnnnnnnnnnnnnnnnnnnnnnnnnnnnnnnnnnnnnnnnnnnnnnnnnnnnnnnnnnnnnnnnnnnnnnnnnnnnnnnnnnnnnnnnnnnnnnnnnnnnnnnnnnnnnnnnnnnnnnnnnnnnnnnnnnnnnnnnnnnnnnnnnnnnnnnnnnnnnnnnnnnnnnnnnnnnnnnnnnnnnnnnnnnnnnnnnnnnnnnnnnnnnnnnnnnnnnnnnnnnnnnnnnnnnnnnnnnnnnnnnnnnnnnnnnnnnnnnnnnnnnnnnnnnnnnnnnnnnnnnnnnnnnnnnnnnnnnnnnnnnnnnnnnnnnnnnnnnnnnnnnnnnnnnnnnnnnnnnnnnnnnnnnnnnnnnnnnnnnnnnnnnnnnnnnnnnnnnnnnnnnnnnnnnnnnnnnnnnnnnnnnnnnnnnnnnnnnnnnnnnnnnnnnnnnnnnnnnnnnnnnnnnnnnnnnnnnnnnnnnnnnnnnnnnnnnnnnnnnnnnnnnnnnnnnnnnnnnnnnnnnnnnnnnnnnnnnnnnnnnnnnnnnnnnnnnnnnnnnnnnnnnnnnnnnnnnnnnnnnnnnnnnnnnnnnnnnnnnnnnnnnnnnnnnnnnnnnnnnnnnnnnnnnnnnnnnnnnnnnnnnnnnnnnnnnnnnnnnnnnnnnnnnnnnnnnnnnnnnnnnnnnnnnnnnnnnnnnnnnnnnnnnnnnnnnnnnnnnnnnnnnnnnnnnnnnnnnnnnnnnnnnnnnnnnnnnnnnnnnnnnnnnnnnnnnnnnnnnnnnnnnnnnnnnnnnnnnnnnnnnnnnnnnnnnnnnnnnnnnnnnnnnnnnnnnnnnnnnnnnnnnnnnnnnnnnnnnnnnnnnnnnnnnnnnnnnnnnnnnnnnnnnnnnnnnnnnnnnnnnnnnnnnnnnnnnnnnnnnnnnnnnnnnnnnnnnnnnnnnnnnnnnnnnnnnnnnnnnnnnnnnnnnnnnnnnnnnnnnnnnnnnnnnnnnnnnnnnnnnnnnnnnnnnnnnnnnnnnnnnnnnnnnnnnnnnnnnnnnnnnnnnnnnnnnnnnnnnnnnnnnnnnnnnnnnnnnnnnnnnnnnnnnnnnnnnnnnnnnnnnnnnnnnnnnnnnnnnnnnnnnnnnnnnnnnnnnnnnnnnnnnnnnnnnnnnnnnnnnnnnnnnnnnnnnnnnnnnnnnnnnnnnnnnnnnnnnnnnnnnnnnnnnnnnnnnnnnnnnnnnnnnnnnnnnnnnnnnnnnnnnnnnnnnnnnnnnnnnnnnnnnnnnnnnnnnnnnnnnnnnnnnnnnnnnnnnnnnnnnnnnnnnnnnnnnnnnnnnnnnnnnnnnnnnnnnnnnnnnnnnnnnnnnnnnnnnnnnnnnnnnnnnnnnnnnnnnnnnnnnnnnnnnnnnnnnnnnnnnnnnnnnnnnnnnnnnnnnnnnnnnnnnnnnnnnnnnnnnnnnnnnnnnnnnnnnnnnnnnnnnnnnnnnnnnnnnnnnnnnnnnnnnnnnnnnnnnnnnnnnnnnnnnnnnnnnnnnnnnnnnnnnnnnnnnnnnnnnnnnnnnnnnnnnnnnnnnnnnnnnnnnnnnnnnnnnnnnnnnnnnnnnnnnnnnnnnnnnnnnnnnnnnnnnnnnnnnnnnnnnnnnnnnnnnnnnnnnnnnnnnnnnnnnnnnnnnnnnnnnnnnnnnnnnnnnnnnnnnnnnnnnnnnnnnnnnnnnnnnnnnnnnnnnnnnnnnnnnnnnnnnnnnnnnnnnnnnnnnnnnnnnnnnnnnnnnnnnnnnnnnnnnnnnnnnnnnnnnnnnnnnnnnnnnnnnnnnnnnnnnnnnnnnnnnnnnnnnnnnnnnnnnnnnnnnnnnnnnnnnnnnnnnnnnnnnnnnnnnnnnnnnnnnnnnnnnnnnnnnnnnnnnnnnnnnnnnnnnnnnnnnnnnnnnnnnnnnnnnnnnnnnnnnnnnnnnnnnnnnnnnnnnnnnnnnnnnnnnnnnnnnnnnnnnnnnnnnnnnnnnnnnnnnnnnnnnnnnnnnnnnnnnnnnnnnnnnnnnnnnnnnnnnnnnnnnnnnnnnnnnnnnnnnnnnnnnnnnnnnnnnnnnnnnnnnnnnnnnnnnnnnnnnnnnnnnnnnnnnnnnnnnnnnnnnnnnnnnnnnnnnnnnnnnnnnnnnnnnnnnnnnnnnnnnnnnnnnnnnnnnnnnnnnnnnnnnnnnnnnnnnnnnnnnnnnnnnnnnnnnnnnnnnnnnnnnnnnnnnnnnnnnnnnnnnnnnnnnnnnnnnnnnnnnnnnnnnnnnnnnnnnnnnnnnnnnnnnnnnnnnnnnnnnnnnnnnnnnnnnnnnnnnnnnnnnnnnnnnnnnnnnnnnnnnnnnnnnnnnnnnnnnnnnnnnnnnnnnnnnnnnnnnnnnnnnnnnnnnnnnnnnnnnnnnnnnnnnnnnnnnnnnnnnnnnnnnnnnnnnnnnnnnnnnnnnnnnnnnnnnnnnnnnnnnnnnnnnnnnnnnnnnnnnnnnnnnnnnnnnnnnnnnnnnnnnnnnnnnnnnnnnnnnnnnnnnnnnnnnnnnnnnnnnnnnnnnnnnnnnnnnnnnnnnnnnnnnnnnnnnnnnnnnnnnnnnnnnnnnnnnnnnnnnnnnnnnnnnnnnnnnnnnnnnnnnnnnnnnnnnnnnnnnnnnnnnnnnnnnnnnnnnnnnnnnnnnnnnnnnnnnnnnnnnnnnnnnnnnnnnnnnnnnnnnnnnnnnnnnnnnnnnnnnnnnnnnnnnnnnnnnnnnnnnnnnnnnnnnnnnnnnnnnnnnnnnnnnnnnnnnnnnnnnnnnnnnnnnnnnnnnnnnnnnnnnnnnnnnnnnnnnnnnnnnnnnnnnnnnnnnnnnnnnnnnnnnnnnnnnnnnnnnnnnnnnnnnnnnnnnnnnnnnnnnnnnnnnnnnnnnnnnnnnnnnnnnnnnnnnnnnnnnnnnnnnnnnnnnnnnnnnnnnnnnnnnnnnnnnnnnnnnnnnnnnnnnnnnnnnnnnnnnnnnnnnnnnnnnnnnnnnnnnnnnnnnnnnnnnnnnnnnnnnnnnnnnnnnnnnnnnnnnnnnnnnnnnnnnnnnnnnnnnnnnnnnnnnnnnnnnnnnnnnnnnnnnnnnnnnnnnnnnnnnnnnnnnnnnnnnnnnnnnnnnnnnnnnnnnnnnnnnnnnnnnnnnnnnnnnnnnnnnnnnnnnnnnnnnnnnnnnnnnnnnnnnnnnnnnnnnnnnnnnnnnnnnnnnnnnnnnnnnnnnnnnnnnnnnnnnnnnnnnnnnnnnnnnnnnnnnnnnnnnnnnnnnnnnnnnnnnnnnnnnnnnnnnnnnnnnnnnnnnnnnnnnnnnnnnnnnnnnnnnnnnnnnnnnnnnnnnnnnnnnnnnnnnnnnnnnnnnnnnnnnnnnnnnnnnnnnnnnnnnnnnnnnnnnnnnnnnnnnnnnnnnnnnnnnnnnnnnnnnnnnnnnnnnnnnnnnnnnnnnnnnnnnnnnnnnnnnnnnnnnnnnnnnnnnnnnnnnnnnnnnnnnnnnnnnnnnnnnnnnnnnnnnnnnnnnnnnnnnnnnnnnnnnnnnnnnnnnnnnnnnnnnnnnnnnnnnnnnnnnnnnnnnnnnnnnnnnnnnnnnnnnnnnnnnnnnnnnnnnnnnnnnnnnnnnnnnnnnnnnnnnnnnnnnnnnnnnnnnnnnnnnnnnnnnnnnnnnnnnnnnnnnnnnnnnnnnnnnnnnnnnnnnnnnnnnnnnnnnnnnnnnnnnnnnnnnnnnnnnnnnnnnnnnnnnnnnnnnnnnnnnnnnnnnnnnnnnnnnnnnnnnnnnnnnnnnnnnnnnnnnnnnnnnnnnnnnnnnnnnnnnnnnnnnnnnnnnnnnnnnnnnnnnnnnnnnnnnnnnnnnnnnnnnnnnnnnnnnnnnnnnnnnnnnnnnnnnnnnnnnnnnnnnnnnnnnnnnnnnnnnnnnnnnnnnnnnnnnnnnnnnnnnnnnnnnnnnnnnnnnnnnnnnnnnnnnnnnnnnnnnnnnnnnnnnnnnnnnnnnnnnnnnnnnnnnnnnnnnnnnnnnnnnnnnnnnnnnnnnnnnnnnnnnnnnnnnnnnnnnnnnnnnnnnnnnnnnnnnnnnnnnnnnnnnnnnnnnnnnnnnnnnnnnnnnnnnnnnnnnnnnnnnnnnnnnnnnnnnnnnnnnnnnnnnnnnnnnnnnnnnnnnnnnnnnnnnnnnnnnnnnnnnnnnnnnnnnnnnnnnnnnnnnnnnnnnnnnnnnnnnnnnnnnnnnnnnnnnnnnnnnnnnnnnnnnnnnnnnnnnnnnnnnnnnnnnnnnnnnnnnnnnnnnnnnnnnnnnnnnnnnnnnnnnnnnnnnnnnnnnnnnnnnnnnnnnnnnnnnnnnnnnnnnnnnnnnnnnnnnnnnnnnnnnnnnnnnnnnnnnnnnnnnnnnnnnnnnnnnnnnnnnnnnnnnnnnnnnnnnnnnnnnnnnnnnnnnnnnnnnnnnnnnnnnnnnnnnnnnnnnnnnnnnnnnnnnnnnnnnnnnnnnnnnnnnnnnnnnnnnnnnnnnnnnnnnnnnnnnnnnnnnnnnnnnnnnnnnnnnnnnnnnnnnnnnnnnnnnnnnnnnnnnnnnnnnnnnnnnnnnnnnnnnnnnnnnnnnnnnnnnnnnnnnnnnnnnnnnnnnnnnnnnnnnnnnnnnnnnnnnnnnnnnnnnnnnnnnnnnnnnnnnnnnnnnnnnnnnnnnnnnnnnnnnnnnnnnnnnnnnnnnnnnnnnnnnnnnnnnnnnnnnnnnnnnnnnnnnnnnnnnnnnnnnnnnnnnnnnnnnnnnnnnnnnnnnnnnnnnnnnnnnnnnnnnnnnnnnnnnnnnnnnnnnnnnnnnnnnnnnnnnnnnnnnnnnnnnnnnnnnnnnnnnnnnnnnnnnnnnnnnnnnnnnnnnnnnnnnnnnnnnnnnnnnnnnnnnnnnnnnnnnnnnnnnnnnnnnnnnnnnnnnnnnnnnnnnnnnnnnnnnnnnnnnnnnnnnnnnnnnnnnnnnnnnnnnnnnnnnnnnnnnnnnnnnnnnnnnnnnnnnnnnnnnnnnnnnnnnnnnnnnnnnnnnnnnnnnnnnnnnnnnnnnnnnnnnnnnnnnnnnnnnnnnnnnnnnnnnnnnnnnnnnnnnnnnnnnnnnnnnnnnnnnnnnnnnnnnnnnnnnnnnnnnnnnnnnnnnnnnnnnnnnnnnnnnnnnnnnnnnnnnnnnnnnnnnnnnnnnnnnnnnnnnnnnnnnnnnnnnnnnnnnnnnnnnnnnnnnnnnnnnnnnnnnnnnnnnnnnnnnnnnnnnnnnnnnnnnnnnnnnnnnnnnnnnnnnnnnnnnnnnnnnnnnnnnnnnnnnnnnnnnnnnnnnnnnnnnnnnnnnnnnnnnnnnnnnnnnnnnnnnnnnnnnnnnnnnnnnnnnnnnnnnnnnnnnnnnnnnnnnnnnnnnnnnnnnnnnnnnnnnnnnnnnnnnnnnnnnnnnnnnnnnnnnnnnnnnnnnnnnnnnnnnnnnnnnnnnnnnnnnnnnnnnnnnnnnnnnnnnnnnnnnnnnnnnnnnnnnnnnnnnnnnnnnnnnnnnnnnnnnnnnnnnnnnnnnnnnnnnnnnnnnnnnnnnnnnnnnnnnnnnnnnnnnnnnnnnnnnnnnnnnnnnnnnnnnnnnnnnnnnnnnnnnnnnnnnnnnnnnnnnnnnnnnnnnnnnnnnnnnnnnnnnnnnnnnnnnnnnnnnnnnnnnnnnnnnnnnnnnnnnnnnnnnnnnnnnnnnnnnnnnnnnnnnnnnnnnnnnnnnnnnnnnnnnnnnnnnnnnnnnnnnnnnnnnnnnnnnnnnnnnnnnnnnnnnnnnnnnnnnnnnnnnnnnnnnnnnnnnnnnnnnnnnnnnnnnnnnnnnnnnnnnnnnnnnnnnnnnnnnnnnnnnnnnnnnnnnnnnnnnnnnnnnnnnnnnnnnnnnnnnnnnnnnnnnnnnnnnnnnnnnnnnnnnnnnnnnnnnnnnnnnnnnnnnnnnnnnnnnnnnnnnnnnnnnnnnnnnnnnnnnnnnnnnnnnnnnnnnnnnnnnnnnnnnnnnnnnnnnnnnnnnnnnnnnnnnnnnnnnnnnnnnnnnnnnnnnnnnnnnnnnnnnnnnnnnnnnnnnnnnnnnnnnnnnnnnnnnnnnnnnnnnnnnnnnnnnnnnnnnnnnnnnnnnnnnnnnnnnnnnnnnnnnnnnnnnnnnnnnnnnnnnnnnnnnnnnnnnnnnnnnnnnnnnnnnnnnnnnnnnnnnnnnnnnnnnnnnnnnnnnnnnnnnnnnnnnnnnnnnnnnnnnnnnnnnnnnnnnnnnnnnnnnnnnnnnnnnnnnnnnnnnnnnnnnnnnnnnnnnnnnnnnnnnnnnnnnnnnnnnnnnnnnnnnnnnnnnnnnnnnnnnnnnnnnnnnnnnnnnnnnnnnnnnnnnnnnnnnnnnnnnnnnnnnnnnnnnnnnnnnnnnnnnnnnnnnnnnnnnnnnnnnnnnnnnnnnnnnnnnnnnnnnnnnnnnnnnnnnnnnnnnnnnnnnnnnnnnnnnnnnnnnnnnnnnnnnnnnnnnnnnnnnnnnnnnnnnnnnnnnnnnnnnnnnnnnnnnnnnnnnnnnnnnnnnnnnnnnnnnnnnnnnnnnnnnnnnnnnnnnnnnnnnnnnnnnnnnnnnnnnnnnnnnnnnnnnnnnnnnnnnnnnnnnnnnnnnnnnnnnnnnnnnnnnnnnnnnnnnnnnnnnnnnnnnnnnnnnnnnnnnnnnnnnnnnnnnnnnnnnnnnnnnnnnnnnnnnnnnnnnnnnnnnnnnnnnnnnnnnnnnnnnnnnnnnnnnnnnnnnnnnnnnnnnnnnnnnnnnnnnnnnnnnnnnnnnnnnnnnnnnnnnnnnnnnnnnnnnnnnnnnnnnnnnnnnnnnnnnnnnnnnnnnnnnnnnnnnnnnnnnnnnnnnnnnnnnnnnnnnnnnnnnnnnnnnnnnnnnnnnnnnnnnnnnnnnnnnnnnnnnnnnnnnnnnnnnnnnnnnnnnnnnnnnnnnnnnnnnnnnnnnnnnnnnnnnnnnnnnnnnnnnnnnnnnnnnnnnnnnnnnnnnnnnnnnnnnnnnnnnnnnnnnnnnnnnnnnnnnnnnnnnnnnnnnnnnnnnnnnnnnnnnnnnnnnnnnnnnnnnnnnnnnnnnnnnnnnnnnnnnnnnnnnnnnnnnnnnnnnnnnnnnnnnnnnnnnnnnnnnnnnnnnnnnnnnnnnnnnnnnnnnnnnnnnnnnnnnnnnnnnnnnnnnnnnnnnnnnnnnnnnnnnnnnnnnnnnnnnnnnnnnnnnnnnnnnnnnnnnnnnnnnnnnnnnnnnnnnnnnnnnnnnnnnnnnnnnnnnnnnnnnnnnnnnnnnnnnnnnnnnnnnnnnnnnnnnnnnnnnnnnnnnnnnnnnnnnnnnnnnnnnnnnnnnnnnnnnnnnnnnnnnnnnnnnnnnnnnnnnnnnnnnnnnnnnnnnnnnnnnnnnnnnnnnnnnnnnnnnnnnnnnnnnnnnnnnnnnnnnnnnnnnnnnnnnnnnnnnnnnnnnnnnnnnnnnnnnnnnnnnnnnnnnnnnnnnnnnnnnnnnnnnnnnnnnnnnnnnnnnnnnnnnnnnnnnnnnnnnnnnnnnnnnnnnnnnnnnnnnnnnnnnnnnnnnnnnnnnnnnnnnnnnnnnnnnnnnnnnnnnnnnnnnnnnnnnnnnnnnnnnnnnnnnnnnnnnnnnnnnnnnnnnnnnnnnnnnnnnnnnnnnnnnnnnnnnnnnnnnnnnnnnnnnnnnnnnnnnnnnnnnnnnnnnnnnnnnnnnnnnnnnnnnnnnnnnnnnnnnnnnnnnnnnnnnnnnnnnnnnnnnnnnnnnnnnnnnnnnnnnnnnnnnnnnnnnnnnnnnnnnnnnnnnnnnnnnnnnnnnnnnnnnnnnnnnnnnnnnnnnnnnnnnnnnnnnnnnnnnnnnnnnnnnnnnnnnnnnnnnnnnnnnnnnnnnnnnnnnnnnnnnnnnnnnnnnnnnnnnnnnnnnnnnnnnnnnnnnnnnnnnnnnnnnnnnnnnnnnnnnnnnnnnnnnnnnnnnnnnnnnnnnnnnnnnnnnnnnnnnnnnnnnnnnnnnnnnnnnnnnnnnnnnnnnnnnnnnnnnnnnnnnnnnnnnnnnnnnnnnnnnnnnnnnnnnnnnnnnnnnnnnnnnnnnnnnnnnnnnnnnnnnnnnnnnnnnnnnnnnnnnnnnnnnnnnnnnnnnnnnnnnnnnnnnnnnnnnnnnnnnnnnnnnnnnnnnnnnnnnnnnnnnnnnnnnnnnnnnnnnnnnnnnnnnnnnnnnnnnnnnnnnnnnnnnnnnnnnnnnnnnnnnnnnnnnnnnnnnnnnnnnnnnnnnnnnnnnnnnnnnnnnnnnnnnnnnnnnnnnnnnnnnnnnnnnnnnnnnnnnnnnnnnnnnnnnnnnnnnnnnnnnnnnnnnnnnnnnnnnnnnnnnnnnnnnnnnnnnnnnnnnnnnnnnnnnnnnnnnnnnnnnnnnnnnnnnnnnnnnnnnnnnnnnnnnnnnnnnnnnnnnnnnnnnnnnnnnnnnnnnnnnnnnnnnnnnnnnnnnnnnnnnnnnnnnnnnnnnnnnnnnnnnnnnnnnnnnnnnnnnnnnnnnnnnnnnnnnnnnnnnnnnnnnnnnnnnnnnnnnnnnnnnnnnnnnnnnnnnnnnnnnnnnnnnnnnnnnnnnnnnnnnnnnnnnnnnnnnnnnnnnnnnnnnnnnnnnnnnnnnnnnnnnnnnnnnnnnnnnnnnnnnnnnnnnnnnnnnnnnnnnnnnnnnnnnnnnnnnnnnnnnnnnnnnnnnnnnnnnnnnnnnnnnnnnnnnnnnnnnnnnnnnnnnnnnnnnnnnnnnnnnnnnnnnnnnnnnnnnnnnnnnnnnnnnnnnnnnnnnnnnnnnnnnnnnnnnnnnnnnnnnnnnnnnnnnnnnnnnnnnnnnnnnnnnnnnnnnnnnnnnnnnnnnnnnnnnnnnnnnnnnnnnnnnnnnnnnnnnnnnnnnnnnnnnnnnnnnnnnnnnnnnnnnnnnnnnnnnnnnnnnnnnnnnnnnnnnnnnnnnnnnnnnnnnnnnnnnnnnnnnnnnnnnnnnnnnnnnnnnnnnnnnnnnnnnnnnnnnnnnnnnnnnnnnnnnnnnnnnnnnnnnnnnnnnnnnnnnnnnnnnnnnnnnnnnnnnnnnnnnnnnnnnnnnnnnnnnnnnnnnnnnnnnnnnnnnnnnnnnnnnnnnnnnnnnnnnnnnnnnnnnnnnnnnnnnnnnnnnnnnnnnnnnnnnnnnnnnnnnnnnnnnnnnnnnnnnnnnnnnnnnnnnnnnnnnnnnnnnnnnnnnnnnnnnnnnnnnnnnnnnnnnnnnnnnnnnnnnnnnnnnnnnnnnnnnnnnnnnnnnnnnnnnnnnnnnnnnnnnnnnnnnnnnnnnnnnnnnnnnnnnnnnnnnnnnnnnnnnnnnnnnnnnnnnnnnnnnnnnnnnnnnnnnnnnnnnnnnnnnnnnnnnnnnnnnnnnnnnnnnnnnnnnnnnnnnnnnnnnnnnnnnnnnnnnnnnnnnnnnnnnnnnnnnnnnnnnnnnnnnnnnnnnnnnnnnnnnnnnnnnnnnnnnnnnnnnnnnnnnnnnnnnnnnnnnnnnnnnnnnnnnnnnnnnnnnnnnnnnnnnnnnnnnnnnnnnnnnnnnnnnnnnnnnnnnnnnnnnnnnnnnnnnnnnnnnnnnnnnnnnnnnnnnnnnnnnnnnnnnnnnnnnnnnnnnnnnnnnnnnnnnnnnnnnnnnnnnnnnnnnnnnnnnnnnnnnnnnnnnnnnnnnnnnnnnnnnnnnnnnnnnnnnnnnnnnnnnnnnnnnnnnnnnnnnnnnnnnnnnnnnnnnnnnnnnnnnnnnnnnnnnnnnnnnnnnnnnnnnnnnnnnnnnnnnnnnnnnnnnnnnnnnnnnnnnnnnnnnnnnnnnnnnnnnnnnnnnnnnnnnnnnnnnnnnnnnnnnnnnnnnnnnnnnnnnnnnnnnnnnnnnnnnnnnnnnnnnnnnnnnnnnnnnnnnnnnnnnnnnnnnnnnnnnnnnnnnnnnnnnnnnnnnnnnnnnnnnnnnnnnnnnnnnnnnnnnnnnnnnnnnnnnnnnnnnnnnnnnnnnnnnnnnnnnnnnnnnnnnnnnnnnnnnnnnnnnnnnnnnnnnnnnnnnnnnnnnnnnnnnnnnnnnnnnnnnnnnnnnnnnnnnnnnnnnnnnnnnnnnnnnnnnnnnnnnnnnnnnnnnnnnnnnnnnnnnnnnnnnnnnnnnnnnnnnnnnnnnnnnnnnnnnnnnnnnnnnnnnnnnnnnnnnnnnnnnnnnnnnnnnnnnnnnnnnnnnnnnnnnnnnnnnnnnnnnnnnnnnnnnnnnnnnnnnnnnnnnnnnnnnnnnnnnnnnnnnnnnnnnnnnnnnnnnnnnnnnnnnnnnnnnnnnnnnnnnnnnnnnnnnnnnnnnnnnnnnnnnnnnnnnnnnnnnnnnnnnnnnnnnnnnnnnnnnnnnnnnnnnnnnnnnnnnnnnnnnnnnnnnnnnnnnnnnnnnnnnnnnnnnnnnnnnnnnnnnnnnnnnnnnnnnnnnnnnnnnnnnnnnnnnnnnnnnnnnnnnnnnnnnnnnnnnnnnnnnnnnnnnnnnnnnnnnnnnnnnnnnnnnnnnnnnnnnnnnnnnnnnnnnnnnnnnnnnnnnnnnnnnnnnnnnnnnnnnnnnnnnnnnnnnnnnnnnnnnnnnnnnnnnnnnnnnnnnnnnnnnnnnnnnnnnnnnnnnnnnnnnnnnnnnnnnnnnnnnnnnnnnnnnnnnnnnnnnnnnnnnnnnnnnnnnnnnnnnnnnnnnnnnnnnnnnnnnnnnnnnnnnnnnnnnnnnnnnnnnnnnnnnnnnnnnnnnnnnnnnnnnnnnnnnnnnnnnnnnnnnnnnnnnnnnnnnnnnnnnnnnnnnnnnnnnnnnnnnnnnnnnnnnnnnnnnnnnnnnnnnnnnnnnnnnnnnnnnnnnnnnnnnnnnnnnnnnnnnnnnnnnnnnnnnnnnnnnnnnnnnnnnnnnnnnnnnnnnnnnnnnnnnnnnnnnnnnnnnnnnnnnnnnnnnnnnnnnnnnnnnnnnnnnnnnnnnnnnnnnnnnnnnnnnnnnnnnnnnnnnnnnnnnnnnnnnnnnnnnnnnnnnnnnnnnnnnnnnnnnnnnnnnnnnnnnnnnnnnnnnnnnnnnnnnnnnnnnnnnnnnnnnnnnnnnnnnnnnnnnnnnnnnnnnnnnnnnnnnnnnnnnnnnnnnnnnnnnnnnnnnnnnnnnnnnnnnnnnnnnnnnnnnnnnnnnnnnnnnnnnnnnnnnnnnnnnnnnnnnnnnnnnnnnnnnnnnnnnnnnnnnnnnnnnnnnnnnnnnnnnnnnnnnnnnnnnnnnnnnnnnnnnnnnnnnnnnnnnnnnnnnnnnnnnnnnnnnnnnnnnnnnnnnnnnnnnnnnnnnnnnnnnnnnnnnnnnnnnnnnnnnnnnnnnnnnnnnnnnnnnnnnnnnnnnnnnnnnnnnnnnnnnnnnnnnnnnnnnnnnnnnnnnnnnnnnnnnnnnnnnnnnnnnnnnnnnnnnnnnnnnnnnnnnnnnnnnnnnnnnnnnnnnnnnnnnnnnnnnnnnnnnnnnnnnnnnnnnnnnnnnnnnnnnnnnnnnnnnnnnnnnnnnnnnnnnnnnnnnnnnnnnnnnnnnnnnnnnnnnnnnnnnnnnnnnnnnnnnnnnnnnnnnnnnnnnnnnnnnnnnnnnnnnnnnnnnnnnnnnnnnnnnnnnnnnnnnnnnnnnnnnnnnnnnnnnnnnnnnnnnnnnnnnnnnnnnnnnnnnnnnnnnnnnnnnnnnnnnnnnnnnnnnnnnnnnnnnnnnnnnnnnnnnnnnnnnnnnnnnnnnnnnnnnnnnnnnnnnnnnnnnnnnnnnnnnnnnnnnnnnnnnnnnnnnnnnnnnnnnnnnnnnnnnnnnnnnnnnnnnnnnnnnnnnnnnnnnnnnnnnnnnnnnnnnnnnnnnnnnnnnnnnnnnnnnnnnnnnnnnnnnnnnnnnnnnnnnnnnnnnnnnnnnnnnnnnnnnnnnnnnnnnnnnnnnnnnnnnnnnnnnnnnnnnnnnnnnnnnnnnnnnnnnnnnnnnnnnnnnnnnnnnnnnnnnnnnnnnnnnnnnnnnnnnnnnnnnnnnnnnnnnnnnnnnnnnnnnnnnnnnnnnnnnnnnnnnnnnnnnnnnnnnnnnnnnnnnnnnnnnnnnnnnnnnnnnnnnnnnnnnnnnnnnnnnnnnnnnnnnnnnnnnnnnnnnnnnnnnnnnnnnnnnnnnnnnnnnnnnnnnnnnnnnnnnnnnnnnnnnnnnnnnnnnnnnnnnnnnnnnnnnnnnnnnnnnnnnnnnnnnnnnnnnnnnnnnnnnnnnnnnnnnnnnnnnnnnnnnnnnnnnnnnnnnnnnnnnnnnnnnnnnnnnnnnnnnnnnnnnnnnnnnnnnnnnnnnnnnnnnnnnnnnnnnnnnnnnnnnnnnnnnnnnnnnnnnnnnnnnnnnnnnnnnnnnnnnnnnnnnnnnnnnnnnnnnnnnnnnnnnnnnnnnnnnnnnnnnnnnnnnnnnnnnnnnnnnnnnnnnnnnnnnnnnnnnnnnnnnnnnnnnnnnnnnnnnnnnnnnnnnnnnnnnnnnnnnnnnnnnnnnnnnnnnnnnnnnnnnnnnnnnnnnnnnnnnnnnnnnnnnnnnnnnnnnnnnnnnnnnnnnnnnnnnnnnnnnnnnnnnnnnnnnnnnnnnnnnnnnnnnnnnnnnnnnnnnnnnnnnnnnnnnnnnnnnnnnnnnnnnnnnnnnnnnnnnnnnnnnnnnnnnnnnnnnnnnnnnnnnnnnnnnnnnnnnnnnnnnnnnnnnnnnnnnnnnnnnnnnnnnnnnnnnnnnnnnnnnnnnnnnnnnnnnnnnnnnnnnnnnnnnnnnnnnnnnnnnnnnnnnnnnnnnnnnnnnnnnnnnnnnnnnnnnnnnnnnnnnnnnnnnnnnnnnnnnnnnnnnnnnnnnnnnnnnnnnnnnnnnnnnnnnnnnnnnnnnnnnnnnnnnnnnnnnnnnnnnnnnnnnnnnnnnnnnnnnnnnnnnnnnnnnnnnnnnnnnnnnnnnnnnnnnnnnnnnnnnnnnnnnnnnnnnnnnnnnnnnnnnnnnnnnnnnnnnnnnnnnnnnnnnnnnnnnnnnnnnnnnnnnnnnnnnnnnnnnnnnnnnnnnnnnnnnnnnnnnnnnnnnnnnnnnnnnnnnnnnnnnnnnnnnnnnnnnnnnnnnnnnnnnnnnnnnnnnnnnnnnnnnnnnnnnnnnnnnnnnnnnnnnnnnnnnnnnnnnnnnnnnnnnnnnnnnnnnnnnnnnnnnnnnnnnnnnnnnnnnnnnnnnnnnnnnnnnnnnnnnnnnnnnnnnnnnnnnnnnnnnnnnnnnnnnnnnnnnnnnnnnnnnnnnnnnnnnnnnnnnnnnnnnnnnnnnnnnnnnnnnnnnnnnnnnnnnnnnnnnnnnnnnnnnnnnnnnnnnnnnnnnnnnnnnnnnnnnnnnnnnnnnnnnnnnnnnnnnnnnnnnnnnnnnnnnnnnnnnnnnnnnnnnnnnnnnnnnnnnnnnnnnnnnnnnnnnnnnnnnnnnnnnnnnnnnnnnnnnnnnnnnnnnnnnnnnnnnnnnnnnnnnnnnnnnnnnnnnnnnnnnnnnnnnnnnnnnnnnnnnnnnnnnnnnnnnnnnnnnnnnnnnnnnnnnnnnnnnnnnnnnnnnnnnnnnnnnnnnnnnnnnnnnnnnnnnnnnnnnnnnnnnnnnnnnnnnnnnnnnnnnnnnnnnnnnnnnnnnnnnnnnnnnnnnnnnnnnnnnnnnnnnnnnnnnnnnnnnnnnnnnnnnnnnnnnnnnnnnnnnnnnnnnnnnnnnnnnnnnnnnnnnnnnnnnnnnnnnnnnnnnnnnnnnnnnnnnnnnnnnnnnnnnnnnnnnnnnnnnnnnnnnnnnnnnnnnnnnnnnnnnnnnnnnnnnnnnnnnnnnnnnnnnnnnnnnnnnnnnnnnnnnnnnnnnnnnnnnnnnnnnnnnnnnnnnnnnnnnnnnnnnnnnnnnnnnnnnnnnnnnnnnnnnnnnnnnnnnnnnnnnnnnnnnnnnnnnnnnnnnnnnnnnnnnnnnnnnnnnnnnnnnnnnnnnnnnnnnnnnnnnnnnnnnnnnnnnnnnnnnnnnnnnnnnnnnnnnnnnnnnnnnnnnnnnnnnnnnnnnnnnnnnnnnnnnnnnnnnnnnnnnnnnnnnnnnnnnnnnnnnnnnnnnnnnnnnnnnnnnnnnnnnnnnnnnnnnnnnnnnnnnnnnnnnnnnnnnnnnnnnnnnnnnnnnnnnnnnnnnnnnnnnnnnnnnnnnnnnnnnnnnnnnnnnnnnnnnnnnnnnnnnnnnnnnnnnnnnnnnnnnnnnnnnnnnnnnnnnnnnnnnnnnnnnnnnnnnnnnnnnnnnnnnnnnnnnnnnnnnnnnnnnnnnnnnnnnnnnnnnnnnnnnnnnnnnnnnnnnnnnnnnnnnnnnnnnnnnnnnnnnnnnnnnnnnnnnnnnnnnnnnnnnnnnnnnnnnnnnnnnnnnnnnnnnnnnnnnnnnnnnnnnnnnnnnnnnnnnnnnnnnnnnnnnnnnnnnnnnnnnnnnnnnnnnnnnnnnnnnnnnnnnnnnnnnnnnnnnnnnnnnnnnnnnnnnnnnnnnnnnnnnnnnnnnnnnnnnnnnnnnnnnnnnnnnnnnnnnnnnnnnnnnnnnnnnnnnnnnnnnnnnnnnnnnnnnnnnnnnnnnnnnnnnnnnnnnnnnnnnnnnnnnnnnnnnnnnnnnnnnnnnnnnnnnnnnnnnnnnnnnnnnnnnnnnnnnnnnnnnnnnnnnnnnnnnnnnnnnnnnnnnnnnnnnnnnnnnnnnnnnnnnnnnnnnnnnnnnnnnnnnnnnnnnnnnnnnnnnnnnnnnnnnnnnnnnnnnnnnnnnnnnnnnnnnnnnnnnnnnnnnnnnnnnnnnnnnnnnnnnnnnnnnnnnnnnnnnnnnnnnnnnnnnnnnnnnnnnnnnnnnnnnnnnnnnnnnnnnnnnnnnnnnnnnnnnnnnnnnnnnnnnnnnnnnnnnnnnnnnnnnnnnnnnnnnnnnnnnnnnnnnnnnnnnnnnnnnnnnnnnnnnnnnnnnnnnnnnnnnnnnnnnnnnnnnnnnnnnnnnnnnnnnnnnnnnnnnnnnnnnnnnnnnnnnnnnnnnnnnnnnnnnnnnnnnnnnnnnnnnnnnnnnnnnnnnnnnnnnnnnnnnnnnnnnnnnnnnnnnnnnnnnnnnnnnnnnnnnnnnnnnnnnnnnnnnnnnnnnnnnnnnnnnnnnnnnnnnnnnnnnnnnnnnnnnnnnnnnnnnnnnnnnnnnnnnnnnnnnnnnnnnnnnnnnnnnnnnnnnnnnnnnnnnnnnnnnnnnnnnnnnnnnnnnnnnnnnnnnnnnnnnnnnnnnnnnnnnnnnnnnnnnnnnnnnnnnnnnnnnnnnnnnnnnnnnnnnnnnnnnnnnnnnnnnnnnnnnnnnnnnnnnnnnnnnnnnnnnnnnnnnnnnnnnnnnnnnnnnnnnnnnnnnnnnnnnnnnnnnnnnnnnnnnnnnnnnnnnnnnnnnnnnnnnnnnnnnnnnnnnnnnnnnnnnnnnnnnnnnnnnnnnnnnnnnnnnnnnnnnnnnnnnnnnnnnnnnnnnnnnnnnnnnnnnnnnnnnnnnnnnnnnnnnnnnnnnnnnnnnnnnnnnnnnnnnnnnnnnnnnnnnnnnnnnnnnnnnnnnnnnnnnnnnnnnnnnnnnnnnnnnnnnnnnnnnnnnnnnnnnnnnnnnnnnnnnnnnnnnnnnnnnnnnnnnnnnnnnnnnnnnnnnnnnnnnnnnnnnnnnnnnnnnnnnnnnnnnnnnnnnnnnnnnnnnnnnnnnnnnnnnnnnnnnnnnnnnnnnnnnnnnnnnnnnnnnnnnnnnnnnnnnnnnnnnnnnnnnnnnnnnnnnnnnnnnnnnnnnnnnnnnnnnnnnnnnnnnnnnnnnnnnnnnnnnnnnnnnnnnnnnnnnnnnnnnnnnnnnnnnnnnnnnnnnnnnnnnnnnnnnnnnnnnnnnnnnnnnnnnnnnnnnnnnnnnnnnnnnnnnnnnnnnnnnnnnnnnnnnnnnnnnnnnnnnnnnnnnnnnnnnnnnnnnnnnnnnnnnnnnnnnnnnnnnnnnnnnnnnnnnnnnnnnnnnnnnnnnnnnnnnnnnnnnnnnnnnnnnnnnnnnnnnnnnnnnnnnnnnnnnnnnnnnnnnnnnnnnnnnnnnnnnnnnnnnnnnnnnnnnnnnnnnnnnnnnnnnnnnnnnnnnnnnnnnnnnnnnnnnnnnnnnnnnnnnnnnnnnnnnnnnnnnnnnnnnnnnnnnnnnnnnnnnnnnnnnnnnnnnnnnnnnnnnnnnnnnnnnnnnnnnnnnnnnnnnnnnnnnnnnnnnnnnnnnnnnnnnnnnnnnnnnnnnnnnnnnnnnnnnnnnnnnnnnnnnnnnnnnnnnnnnnnnnnnnnnnnnnnnnnnnnnnnnnnnnnnnnnnnnnnnnnnnnnnnnnnnnnnnnnnnnnnnnnnnnnnnnnnnnnnnnnnnnnnnnnnnnnnnnnnnnnnnnnnnnnnnnnnnnnnnnnnnnnnnnnnnnnnnnnnnnnnnnnnnnnnnnnnnnnnnnnnnnnnnnnnnnnnnnnnnnnnnnnnnnnnnnnnnnnnnnnnnnnnnnnnnnnnnnnnnnnnnnnnnnnnnnnnnnnnnnnnnnnnnnnnnnnnnnnnnnnnnnnnnnnnnnnnnnnnnnnnnnnnnnnnnnnnnnnnnnnnnnnnnnnnnnnnnnnnnnnnnnnnnnnnnnnnnnnnnnnnnnnnnnnnnnnnnnnnnnnnnnnnnnnnnnnnnnnnnnnnnnnnnnnnnnnnnnnnnnnnnnnnnnnnnnnnnnnnnnnnnnnnnnnnnnnnnnnnnnnnnnnnnnnnnnnnnnnnnnnnnnnnnnnnnnnnnnnnnnnnnnnnnnnnnnnnnnnnnnnnnnnnnnnnnnnnnnnnnnnnnnnnnnnnnnnnnnnnnnnnnnnnnnnnnnnnnnnnnnnnnnnnnnnnnnnnnnnnnnnnnnnnnnnnnnnnnnnnnnnnnnnnnnnnnnnnnnnnnnnnnnnnnnnnnnnnnnnnnnnnnnnnnnnnnnnnnnnnnnnnnnnnnnnnnnnnnnnnnnnnnnnnnnnnnnnnnnnnnnnnnnnnnnnnnnnnnnnnnnnnnnnnnnnnnnnnnnnnnnnnnnnnnnnnnnnnnnnnnnnnnnnnnnnnnnnnnnnnnnnnnnnnnnnnnnnnnnnnnnnnnnnnnnnnnnnnnnnnnnnnnnnnnnnnnnnnnnnnnnnnnnnnnnnnnnnnnnnnnnnnnnnnnnnnnnnnnnnnnnnnnnnnnnnnnnnnnnnnnnnnnnnnnnnnnnnnnnnnnnnnnnnnnnnnnnnnnnnnnnnnnnnnnnnnnnnnnnnnnnnnnnnnnnnnnnnnnnnnnnnnnnnnnnnnnnnnnnnnnnnnnnnnnnnnnnnnnnnnnnnnnnnnnnnnnnnnnnnnnnnnnnnnnnnnnnnnnnnnnnnnnnnnnnnnnnnnnnnnnnnnnnnnnnnnnnnnnnnnnnnnnnnnnnnnnnnnnnnnnnnnnnnnnnnnnnnnnnnnnnnnnnnnnnnnnnnnnnnnnnnnnnnnnnnnnnnnnnnnnnnnnnnnnnnnnnnnnnnnnnnnnnnnnnnnnnnnnnnnnnnnnnnnnnnnnnnnnnnnnnnnnnnnnnnnnnnnnnnnnnnnnnnnnnnnnnnnnnnnnnnnnnnnnnnnnnnnnnnnnnnnnnnnnnnnnnnnnnnnnnnnnnnnnnnnnnnnnnnnnnnnnnnnnnnnnnnnnnnnnnnnnnnnnnnnnnnnnnnnnnnnnnnnnnnnnnnnnnnnnnnnnnnnnnnnnnnnnnnnnnnnnnnnnnnnnnnnnnnnnnnnnnnnnnnnnnnnnnnnnnnnnnnnnnnnnnnnnnnnnnnnnnnnnnnnnnnnnnnnnnnnnnnnnnnnnnnnnnnnnnnnnnnnnnnnnnnnnnnnnnnnnnnnnnnnnnnnnnnnnnnnnnnnnnnnnnnnnnnnnnnnnnnnnnnnnnnnnnnnnnnnnnnnnnnnnnnnnnnnnnnnnnnnnnnnnnnnnnnnnnnnnnnnnnnnnnnnnnnnnnnnnnnnnnnnnnnnnnnnnnnnnnnnnnnnnnnnnnnnnnnnnnnnnnnnnnnnnnnnnnnnnnnnnnnnnnnnnnnnnnnnnnnnnnnnnnnnnnnnnnnnnnnnnnnnnnnnnnnnnnnnnnnnnnnnnnnnnnnnnnnnnnnnnnnnnnnnnnnnnnnnnnnnnnnnnnnnnnnnnnnnnnnnnnnnnnnnnnnnnnnnnnnnnnnnnnnnnnnnnnnnnnnnnnnnnnnnnnnnnnnnnnnnnnnnnnnnnnnnnnnnnnnnnnnnnnnnnnnnnnnnnnnnnnnnnnnnnnnnnnnnnnnnnnnnnnnnnnnnnnnnnnnnnnnnnnnnnnnnnnnnnnnnnnnnnnnnnnnnnnnnnnnnnnnnnnnnnnnnnnnnnnnnnnnnnnnnnnnnnnnnnnnnnnnnnnnnnnnnnnnnnnnnnnnnnnnnnnnnnnnnnnnnnnnnnnnnnnnnnnnnnnnnnnnnnnnnnnnnnnnnnnnnnnnnnnnnnnnnnnnnnnnnnnnnnnnnnnnnnnnnnnnnnnnnnnnnnnnnnnnnnnnnnnnnnnnnnnnnnnnnnnnnnnnnnnnnnnnnnnnnnnnnnnnnnnnnnnnnnnnnnnnnnnnnnnnnnnnnnnnnnnnnnnnnnnnnnnnnnnnnnnnnnnnnnnnnnnnnnnnnnnnnnnnnnnnnnnnnnnnnnnnnnnnnnnnnnnnnnnnnnnnnnnnnnnnnnnnnnnnnnnnnnnnnnnnnnnnnnnnnnnnnnnnnnnnnnnnnnnnnnnnnnnnnnnnnnnnnnnnnnnnnnnnnnnnnnnnnnnnnnnnnnnnnnnnnnnnnnnnnnnnnnnnnnnnnnnnnnnnnnnnnnnnnnnnnnnnnnnnnnnnnnnnnnnnnnnnnnnnnnnnnnnnnnnnnnnnnnnnnnnnnnnnnnnnnnnnnnnnnnnnnnnnnnnnnnnnnnnnnnnnnnnnnnnnnnnnnnnnnnnnnnnnnnnnnnnnnnnnnnnnnnnnnnnnnnnnnnnnnnnnnnnnnnnnnnnnnnnnnnnnnnnnnnnnnnnnnnnnnnnnnnnnnnnnnnnnnnnnnnnnnnnnnnnnnnnnnnnnnnnnnnnnnnnnnnnnnnnnnnnnnnnnnnnnnnnnnnnnnnnnnnnnnnnnnnnnnnnnnnnnnnnnnnnnnnnnnnnnnnnnnnnnnnnnnnnnnnnnnnnnnnnnnnnnnnnnnnnnnnnnnnnnnnnnnnnnnnnnnnnnnnnnnnnnnnnnnnnnnnnnnnnnnnnnnnnnnnnnnnnnnnnnnnnnnnnnnnnnnnnnnnnnnnnnnnnnnnnnnnnnnnnnnnnnnnnnnnnnnnnnnnnnnnnnnnnnnnnnnnnnnnnnnnnnnnnnnnnnnnnnnnnnnnnnnnnnnnnnnnnnnnnnnnnnnnnnnnnnnnnnnnnnnnnnnnnnnnnnnnnnnnnnnnnnnnnnnnnnnnnnnnnnnnnnnnnnnnnnnnnnnnnnnnnnnnnnnnnnnnnnnnnnnnnnnnnnnnnnnnnnnnnnnnnnnnnnnnnnnnnnnnnnnnnnnnnnnnnnnnnnnnnnnnnnnnnnnnnnnnnnnnnnnnnnnnnnnnnnnnnnnnnnnnnnnnnnnnnnnnnnnnnnnnnnnnnnnnnnnnnnnnnnnnnnnnnnnnnnnnnnnnnnnnnnnnnnnnnnnnnnnnnnnnnnnnnnnnnnnnnnnnnnnnnnnnnnnnnnnnnnnnnnnnnnnnnnnnnnnnnnnnnnnnnnnnnnnnnnnnnnnnnnnnnnnnnnnnnnnnnnnnnnnnnnnnnnnnnnnnnnnnnnnnnnnnnnnnnnnnnnnnnnnnnnnnnnnnnnnnnnnnnnnnnnnnnnnnnnnnnnnnnnnnnnnnnnnnnnnnnnnnnnnnnnnnnnnnnnnnnnnnnnnnnnnnnnnnnnnnnnnnnnnnnnnnnnnnnnnnnnnnnnnnnnnnnnnnnnnnnnnnnnnnnnnnnnnnnnnnnnnnnnnnnnnnnnnnnnnnnnnnnnnnnnnnnnnnnnnnnnnnnnnnnnnnnnnnnnnnnnnnnnnnnnnnnnnnnnnnnnnnnnnnnnnnnnnnnnnnnnnnnnnnnnnnnnnnnnnnnnnnnnnnnnnnnnnnnnnnnnnnnnnnnnnnnnnnnnnnnnnnnnnnnnnnnnnnnnnnnnnnnnnnnnnnnnnnnnnnnnnnnnnnnnnnnnnnnnnnnnnnnnnnnnnnnnnnnnnnnnnnnnnnnnnnnnnnnnnnnnnnnnnnnnnnnnnnnnnnnnnnnnnnnnnnnnnnnnnnnnnnnnnnnnnnnnnnnnnnnnnnnnnnnnnnnnnnnnnnnnnnnnnnnnnnnnnnnnnnnnnnnnnnnnnnnnnnnnnnnnnnnnnnnnnnnnnnnnnnnnnnnnnnnnnnnnnnnnnnnnnnnnnnnnnnnnnnnnnnnnnnnnnnnnnnnnnnnnnnnnnnnnnnnnnnnnnnnnnnnnnnnnnnnnnnnnnnnnnnnnnnnnnnnnnnnnnnnnnnnnnnnnnnnnnnnnnnnnnnnnnnnnnnnnnnnnnnnnnnnnnnnnnnnnnnnnnnnnnnnnnnnnnnnnnnnnnnnnnnnnnnnnnnnnnnnnnnnnnnnnnnnnnnnnnnnnnnnnnnnnnnnnnnnnnnnnnnnnnnnnnnnnnnnnnnnnnnnnnnnnnnnnnnnnnnnnnnnnnnnnnnnnnnnnnnnnnnnnnnnnnnnnnnnnnnnnnnnnnnnnnnnnnnnnnnnnnnnnnnnnnnnnnnnnnnnnnnnnnnnnnnnnnnnnnnnnnnnnnnnnnnnnnnnnnnnnnnnnnnnnnnnnnnnnnnnnnnnnnnnnnnnnnnnnnnnnnnnnnnnnnnnnnnnnnnnnnnnnnnnnnnnnnnnnnnnnnnnnnnnnnnnnnnnnnnnnnnnnnnnnnnnnnnnnnnnnnnnnnnnnnnnnnnnnnnnnnnnnnnnnnnnnnnnnnnnnnnnnnnnnnnnnnnnnnnnnnnnnnnnnnnnnnnnnnnnnnnnnnnnnnnnnnnnnnnnnnnnnnnnnnnnnnnnnnnnnnnnnnnnnnnnnnnnnnnnnnnnnnnnnnnnnnnnnnnnnnnnnnnnnnnnnnnnnnnnnnnnnnnnnnnnnnnnnnnnnnnnnnnnnnnnnnnnnnnnnnnnnnnnnnnnnnnnnnnnnnnnnnnnnnnnnnnnnnnnnnnnnnnnnnnnnnnnnnnnnnnnnnnnnnnnnnnnnnnnnnnnnnnnnnnnnnnnnnnnnnnnnnnnnnnnnnnnnnnnnnnnnnnnnnnnnnnnnnnnnnnnnnnnnnnnnnnnnnnnnnnnnnnnnnnnnnnnnnnnnnnnnnnnnnnnnnnnnnnnnnnnnnnnnnnnnnnnnnnnnnnnnnnnnnnnnnnnnnnnnnnnnnnnnnnnnnnnnnnnnnnnnnnnnnnnnnnnnnnnnnnnnnnnnnnnnnnnnnnnnnnnnnnnnnnnnnnnnnnnnnnnnnnnnnnnnnnnnnnnnnnnnnnnnnnnnnnnnnnnnnnnnnnnnnnnnnnnnnnnnnnnnnnnnnnnnnnnnnnnnnnnnnnnnnnnnnnnnnnnnnnnnnnnnnnnnnnnnnnnnnnnnnnnnnnnnnnnnnnnnnnnnnnnnnnnnnnnnnnnnnnnnnnnnnnnnnnnnnnnnnnnnnnnnnnnnnnnnnnnnnnnnnnnnnnnnnnnnnnnnnnnnnnnnnnnnnnnnnnnnnnnnnnnnnnnnnnnnnnnnnnnnnnnnnnnnnnnnnnnnnnnnnnnnnnnnnnnnnnnnnnnnnnnnnnnnnnnnnnnnnnnnnnnnnnnnnnnnnnnnnnnnnnnnnnnnnnnnnnnnnnnnnnnnnnnnnnnnnnnnnnnnnnnnnnnnnnnnnnnnnnnnnnnnnnnnnnnnnnnnnnnnnnnnnnnnnnnnnnnnnnnnnnnnnnnnnnnnnnnnnnnnnnnnnnnnnnnnnnnnnnnnnnnnnnnnnnnnnnnnnnnnnnnnnnnnnnnnnnnnnnnnnnnnnnnnnnnnnnnnnnnnnnnnnnnnnnnnnnnnnnnnnnnnnnnnnnnnnnnnnnnnnnnnnnnnnnnnnnnnnnnnnnnnnnnnnnnnnnnnnnnnnnnnnnnnnnnnnnnnnnnnnnnnnnnnnnnnnnnnnnnnnnnnnnnnnnnnnnnnnnnnnnnnnnnnnnnnnnnnnnnnnnnnnnnnnnnnnnnnnnnnnnnnnnnnnnnnnnnnnnnnnnnnnnnnnnnnnnnnnnnnnnnnnnnnnnnnnnnnnnnnnnnnnnnnnnnnnnnnnnnnnnnnnnnnnnnnnnnnnnnnnnnnnnnnnnnnnnnnnnnnnnnnnnnnnnnnnnnnnnnnnnnnnnnnnnnnnnnnnnnnnnnnnnnnnnnnnnnnnnnnnnnnnnnnnnnnnnnnnnnnnnnnnnnnnnnnnnnnnnnnnnnnnnnnnnnnnnnnnnnnnnnnnnnnnnnnnnnnnnnnnnnnnnnnnnnnnnnnnnnnnnnnnnnnnnnnnnnnnnnnnnnnnnnnnnnnnnnnnnnnnnnnnnnnnnnnnnnnnnnnnnnnnnnnnnnnnnnnnnnnnnnnnnnnnnnnnnnnnnnnnnnnnnnnnnnnnnnnnnnnnnnnnnnnnnnnnnnnnnnnnnnnnnnnnnnnnnnnnnnnnnnnnnnnnnnnnnnnnnnnnnnnnnnnnnnnnnnnnnnnnnnnnnnnnnnnnnnnnnnnnnnnnnnnnnnnnnnnnnnnnnnnnnnnnnnnnnnnnnnnnnnnnnnnnnnnnnnnnnnnnnnnnnnnnnnnnnnnnnnnnnnnnnnnnnnnnnnnnnnnnnnnnnnnnnnnnnnnnnnnnnnnnnnnnnnnnnnnnnnnnnnnnnnnnnnnnnnnnnnnnnnnnnnnnnnnnnnnnnnnnnnnnnnnnnnnnnnnnnnnnnnnnnnnnnnnnnnnnnnnnnnnnnnnnnnnnnnnnnnnnnnnnnnnnnnnnnnnnnnnnnnnnnnnnnnnnnnnnnnnnnnnnnnnnnnnnnnnnnnnnnnnnnnnnnnnnnnnnnnnnnnnnnnnnnnnnnnnnnnnnnnnnnnnnnnnnnnnnnnnnnnnnnnnnnnnnnnnnnnnnnnnnnnnnnnnnnnnnnnnnnnnnnnnnnnnnnnnnnnnnnnnnnnnnnnnnnnnnnnnnnnnnnnnnnnnnnnnnnnnnnnnnnnnnnnnnnnnnnnnnnnnnnnnnnnnnnnnnnnnnnnnnnnnnnnnnnnnnnnnnnnnnnnnnnnnnnnnnnnnnnnnnnnnnnnnnnnnnnnnnnnnnnnnnnnnnnnnnnnnnnnnnnnnnnnnnnnnnnnnnnnnnnnnnnnnnnnnnnnnnnnnnnnnnnnnnnnnnnnnnnnnnnnnnnnnnnnnnnnnnnnnnnnnnnnnnnnnnnnnnnnnnnnnnnnnnnnnnnnnnnnnnnnnnnnnnnnnnnnnnnnnnnnnnnnnnnnnnnnnnnnnnnnnnnnnnnnnnnnnnnnnnnnnnnnnnnnnnnnnnnnnnnnnnnnnnnnnnnnnnnnnnnnnnnnnnnnnnnnnnnnnnnnnnnnnnnnnnnnnnnnnnnnnnnnnnnnnnnnnnnnnnnnnnnnnnnnnnnnnnnnnnnnnnnnnnnnnnnnnnnnnnnnnnnnnnnnnnnnnnnnnnnnnnnnnnnnnnnnnnnnnnnnnnnnnnnnnnnnnnnnnnnnnnnnnnnnnnnnnnnnnnnnnnnnnnnnnnnnnnnnnnnnnnnnnnnnnnnnnnnnnnnnnnnnnnnnnnnnnnnnnnnnnnnnnnnnnnnnnnnnnnnnnnnnnnnnnnnnnnnnnnnnnnnnnnnnnnnnnnnnnnnnnnnnnnnnnnnnnnnnnnnnnnnnnnnnnnnnnnnnnnnnnnnnnnnnnnnnnnnnnnnnnnnnnnnnnnnnnnnnnnnnnnnnnnnnnnnnnnnnnnnnnnnnnnnnnnnnnnnnnnnnnnnnnnnnnnnnnnnnnnnnnnnnnnnnnnnnnnnnnnnnnnnnnnnnnnnnnnnnnnnnnnnnnnnnnnnnnnnnnnnnnnnnnnnnnnnnnnnnnnnnnnnnnnnnnnnnnnnnnnnnnnnnnnnnnnnnnnnnnnnnnnnnnnnnnnnnnnnnnnnnnnnnnnnnnnnnnnnnnnnnnnnnnnnnnnnnnnnnnnnnnnnnnnnnnnnnnnnnnnnnnnnnnnnnnnnnnnnnnnnnnnnnnnnnnnnnnnnnnnnnnnnnnnnnnnnnnnnnnnnnnnnnnnnnnnnnnnnnnnnnnnnnnnnnnnnnnnnnnnnnnnnnnnnnnnnnnnnnnnnnnnnnnnnnnnnnnnnnnnnnnnnnnnnnnnnnnnnnnnnnnnnnnnnnnnnnnnnnnnnnnnnnnnnnnnnnnnnnnnnnnnnnnnnnnnnnnnnnnnnnnnnnnnnnnnnnnnnnnnnnnnnnnnnnnnnnnnnnnnnnnnnnnnnnnnnnnnnnnnnnnnnnnnnnnnnnnnnnnnnnnnnnnnnnnnnnnnnnnnnnnnnnnnnnnnnnnnnnnnnnnnnnnnnnnnnnnnnnnnnnnnnnnnnnnnnnnnnnnnnnnnnnnnnnnnnnnnnnnnnnnnnnnnnnnnnnnnnnnnnnnnnnnnnnnnnnnnnnnnnnnnnnnnnnnnnnnnnnnnnnnnnnnnnnnnnnnnnnnnnnnnnnnnnnnnnnnnnnnnnnnnnnnnnnnnnnnnnnnnnnnnnnnnnnnnnnnnnnnnnnnnnnnnnnnnnnnnnnnnnnnnnnnnnnnnnnnnnnnnnnnnnnnnnnnnnnnnnnnnnnnnnnnnnnnnnnnnnnnnnnnnnnnnnnnnnnnnnnnnnnnnnnnnnnnnnnnnnnnnnnnnnnnnnnnnnnnnnnnnnnnnnnnnnnnnnnnnnnnnnnnnnnnnnnnnnnnnnnnnnnnnnnnnnnnnnnnnnnnnnnnnnnnnnnnnnnnnnnnnnnnnnnnnnnnnnnnnnnnnnnnnnnnnnnnnnnnnnnnnnnnnnnnnnnnnnnnnnnnnnnnnnnnnnnnnnnnnnnnnnnnnnnnnnnnnnnnnnnnnnnnnnnnnnnnnnnnnnnnnnnnnnnnnnnnnnnnnnnnnnnnnnnnnnnnnnnnnnnnnnnnnnnnnnnnnnnnnnnnnnnnnnnnnnnnnnnnnnnnnnnnnnnnnnnnnnnnnnnnnnnnnnnnnnnnnnnnnnnnnnnnnnnnnnnnnnnnnnnnnnnnnnnnnnnnnnnnnnnnnnnnnnnnnnnnnnnnnnnnnnnnnnnnnnnnnnnnnnnnnnnnnnnnnnnnnnnnnnnnnnnnnnnnnnnnnnnnnnnnnnnnnnnnnnnnnnnnnnnnnnnnnnnnnnnnnnnnnnnnnnnnnnnnnnnnnnnnnnnnnnnnnnnnnnnnnnnnnnnnnnnnnnnnnnnnnnnnnnnnnnnnnnnnnnnnnnnnnnnnnnnnnnnnnnnnnnnnnnnnnnnnnnnnnnnnnnnnnnnnnnnnnnnnnnnnnnnnnnnnnnnnnnnnnnnnnnnnnnnnnnnnnnnnnnnnnnnnnnnnnnnnnnnnnnnnnnnnnnnnnnnnnnnnnnnnnnnnnnnnnnnnnnnnnnnnnnnnnnnnnnnnnnnnnnnnnnnnnnnnnnnnnnnnnnnnnnnnnnnnnnnnnnnnnnnnnnnnnnnnnnnnnnnnnnnnnnnnnnnnnnnnnnnnnnnnnnnnnnnnnnnnnnnnnnnnnnnnnnnnnnnnnnnnnnnnnnnnnnnnnnnnnnnnnnnnnnnnnnnnnnnnnnnnnnnnnnnnnnnnnnnnnnnnnnnnnnnnnnnnnnnnnnnnnnnnnnnnnnnnnnnnnnnnnnnnnnnnnnnnnnnnnnnnnnnnnnnnnnnnnnnnnnnnnnnnnnnnnnnnnnnnnnnnnnnnnnnnnnnnnnnnnnnnnnnnnnnnnnnnnnnnnnnnnnnnnnnnnnnnnnnnnnnnnnnnnnnnnnnnnnnnnnnnnnnnnnnnnnnnnnnnnnnnnnnnnnnnnnnnnnnnnnnnnnnnnnnnnnnnnnnnnnnnnnnnnnnnnnnnnnnnnnnnnnnnnnnnnnnnnnnnnnnnnnnnnnnnnnnnnnnnnnnnnnnnnnnnnnnnnnnnnnnnnnnnnnnnnnnnnnnnnnnnnnnnnnnnnnnnnnnnnnnnnnnnnnnnnnnnnnnnnnnnnnnnnnnnnnnnnnnnnnnnnnnnnnnnnnnnnnnnnnnnnnnnnnnnnnnnnnnnnnnnnnnnnnnnnnnnnnnnnnnnnnnnnnnnnnnnnnnnnnnnnnnnnnnnnnnnnnnnnnnnnnnnnnnnnnnnnnnnnnnnnnnnnnnnnnnnnnnnnnnnnnnnnnnnnnnnnnnnnnnnnnnnnnnnnnnnnnnnnnnnnnnnnnnnnnnnnnnnnnnnnnnnnnnnnnnnnnnnnnnnnnnnnnnnnnnnnnnnnnnnnnnnnnnnnnnnnnnnnnnnnnnnnnnnnnnnnnnnnnnnnnnnnnnnnnnnnnnnnnnnnnnnnnnnnnnnnnnnnnnnnnnnnnnnnnnnnnnnnnnnnnnnnnnnnnnnnnnnnnnnnnnnnnnnnnnnnnnnnnnnnnnnnnnnnnnnnnnnnnnnnnnnnnnnnnnnnnnnnnnnnnnnnnnnnnnnnnnnnnnnnnnnnnnnnnnnnnnnnnnnnnnnnnnnnnnnnnnnnnnnnnnnnnnnnnnnnnnnnnnnnnnnnnnnnnnnnnnnnnnnnnnnnnnnnnnnnnnnnnnnnnnnnnnnnnnnnnnnnnnnnnnnnnnnnnnnnnnnnnnnnnnnnnnnnnnnnnnnnnnnnnnnnnnnnnnnnnnnnnnnnnnnnnnnnnnnnnnnnnnnnnnnnnnnnnnnnnnnnnnnnnnnnnnnnnnnnnnnnnnnnnnnnnnnnnnnnnnnnnnnnnnnnnnnnnnnnnnnnnnnnnnnnnnnnnnnnnnnnnnnnnnnnnnnnnnnnnnnnnnnnnnnnnnnnnnnnnnnnnnnnnnnnnnnnnnnnnnnnnnnnnnnnnnnnnnnnnnnnnnnnnnnnnnnnnnnnnnnnnnnnnnnnnnnnnnnnnnnnnnnnnnnnnnnnnnnnnnnnnnnnnnnnnnnnnnnnnnnnnnnnnnnnnnnnnnnnnnnnnnnnnnnnnnnnnnnnnnnnnnnnnnnnnnnnnnnnnnnnnnnnnnnnnnnnnnnnnnnnnnnnnnnnnnnnnnnnnnnnnnnnnnnnnnnnnnnnnnnnnnnnnnnnnnnnnnnnnnnnnnnnnnnnnnnnnnnnnnnnnnnnnnnnnnnnnnnnnnnnnnnnnnnnnnnnnnnnnnnnnnnnnnnnnnnnnnnnnnnnnnnnnnnnnnnnnnnnnnnnnnnnnnnnnnnnnnnnnnnnnnnnnnnnnnnnnnnnnnnnnnnnnnnnnnnnnnnnnnnnnnnnnnnnnnnnnnnnnnnnnnnnnnnnnnnnnnnnnnnnnnnnnnnnnnnnnnnnnnnnnnnnnnnnnnnnnnnnnnnnnnnnnnnnnnnnnnnnnnnnnnnnnnnnnnnnnnnnnnnnnnnnnnnnnnnnnnnnnnnnnnnnnnnnnnnnnnnnnnnnnnnnnnnnnnnnnnnnnnnnnnnnnnnnnnnnnnnnnnnnnnnnnnnnnnnnnnnnnnnnnnnnnnnnnnnnnnnnnnnnnnnnnnnnnnnnnnnnnnnnnnnnnnnnnnnnnnnnnnnnnnnnnnnnnnnnnnnnnnnnnnnnnnnnnnnnnnnnnnnnnnnnnnnnnnnnnnnnnnnnnnnnnnnnnnnnnnnnnnnnnnnnnnnnnnnnnnnnnnnnnnnnnnnnnnnnnnnnnnnnnnnnnnnnnnnnnnnnnnnnnnnnnnnnnnnnnnnnnnnnnnnnnnnnnnnnnnnnnnnnnnnnnnnnnnnnnnnnnnnnnnnnnnnnnnnnnnnnnnnnnnnnnnnnnnnnnnnnnnnnnnnnnnnnnnnnnnnnnnnnnnnnnnnnnnnnnnnnnnnnnnnnnnnnnnnnnnnnnnnnnnnnnnnnnnnnnnnnnnnnnnnnnnnnnnnnnnnnnnnnnnnnnnnnnnnnnnnnnnnnnnnnnnnnnnnnnnnnnnnnnnnnnnnnnnnnnnnnnnnnnnnnnnnnnnnnnnnnnnnnnnnnnnnnnnnnnnnnnnnnnnnnnnnnnnnnnnnnnnnnnnnnnnnnnnnnnnnnnnnnnnnnnnnnnnnnnnnnnnnnnnnnnnnnnnnnnnnnnnnnnnnnnnnnnnnnnnnnnnnnnnnnnnnnnnnnnnnnnnnnnnnnnnnnnnnnnnnnnnnnnnnnnnnnnnnnnnnnnnnnnnnnnnnnnnnnnnnnnnnnnnnnnnnnnnnnnnnnnnnnnnnnnnnnnnnnnnnnnnnnnnnnnnnnnnnnnnnnnnnnnnnnnnnnnnnnnnnnnnnnnnnnnnnnnnnnnnnnnnnnnnnnnnnnnnnnnnnnnnnnnnnnnnnnnnnnnnnnnnnnnnnnnnnnnnnnnnnnnnnnnnnnnnnnnnnnnnnnnnnnnnnnnnnnnnnnnnnnnnnnnnnnnnnnnnnnnnnnnnnnnnnnnnnnnnnnnnnnnnnnnnnnnnnnnnnnnnnnnnnnnnnnnnnnnnnnnnnnnnnnnnnnnnnnnnnnnnnnnnnnnnnnnnnnnnnnnnnnnnnnnnnnnnnnnnnnnnnnnnnnnnnnnnnnnnnnnnnnnnnnnnnnnnnnnnnnnnnnnnnnnnnnnnnnnnnnnnnnnnnnnnnnnnnnnnnnnnnnnnnnnnnnnnnnnnnnnnnnnnnnnnnnnnnnnnnnnnnnnnnnnnnnnnnnnnnnnnnnnnnnnnnnnnnnnnnnnnnnnnnnnnnnnnnnnnnnnnnnnnnnnnnnnnnnnnnnnnnnnnnnnnnnnnnnnnnnnnnnnnnnnnnnnnnnnnnnnnnnnnnnnnnnnnnnnnnnnnnnnnnnnnnnnnnnnnnnnnnnnnnnnnnnnnnnnnnnnnnnnnnnnnnnnnnnnnnnnnnnnnnnnnnnnnnnnnnnnnnnnnnnnnnnnnnnnnnnnnnnnnnnnnnnnnnnnnnnnnnnnnnnnnnnnnnnnnnnnnnnnnnnnnnnnnnnnnnnnnnnnnnnnnnnnnnnnnnnnnnnnnnnnnnnnnnnnnnnnnnnnnnnnnnnnnnnnnnnnnnnnnnnnnnnnnnnnnnnnnnnnnnnnnnnnnnnnnnnnnnnnnnnnnnnnnnnnnnnnnnnnnnnnnnnnnnnnnnnnnnnnnnnnnnnnnnnnnnnnnnnnnnnnnnnnnnnnnnnnnnnnnnnnnnnnnnnnnnnnnnnnnnnnnnnnnnnnnnnnnnnnnnnnnnnnnnnnnnnnnnnnnnnnnnnnnnnnnnnnnnnnnnnnnnnnnnnnnnnnnnnnnnnnnnnnnnnnnnnnnnnnnnnnnnnnnnnnnnnnnnnnnnnnnnnnnnnnnnnnnnnnnnnnnnnnnnnnnnnnnnnnnnnnnnnnnnnnnnnnnnnnnnnnnnnnnnnnnnnnnnnnnnnnnnnnnnnnnnnnnnnnnnnnnnnnnnnnnnnnnnnnnnnnnnnnnnnnnnnnnnnnnnnnnnnnnnnnnnnnnnnnnnnnnnnnnnnnnnnnnnnnnnnnnnnnnnnnnnnnnnnnnnnnnnnnnnnnnnnnnnnnnnnnnnnnnnnnnnnnnnnnnnnnnnnnnnnnnnnnnnnnnnnnnnnnnnnnnnnnnnnnnnnnnnnnnnnnnnnnnnnnnnnnnnnnnnnnnnnnnnnnnnnnnnnnnnnnnnnnnnnnnnnnnnnnnnnnnnnnnnnnnnnnnnnnnnnnnnnnnnnnnnnnnnnnnnnnnnnnnnnnnnnnnnnnnnnnnnnnnnnnnnnnnnnnnnnnnnnnnnnnnnnnnnnnnnnnnnnnnnnnnnnnnnnnnnnnnnnnnnnnnnnnnnnnnnnnnnnnnnnnnnnnnnnnnnnnnnnnnnnnnnnnnnnnnnnnnnnnnnnnnnnnnnnnnnnnnnnnnnnnnnnnnnnnnnnnnnnnnnnnnnnnnnnnnnnnnnnnnnnnnnnnnnnnnnnnnnnnnnnnnnnnnnnnnnnnnnnnnnnnnnnnnnnnnnnnnnnnnnnnnnnnnnnnnnnnnnnnnnnnnnnnnnnnnnnnnnnnnnnnnnnnnnnnnnnnnnnnnnnnnnnnnnnnnnnnnnnnnnnnnnnnnnnnnnnnnnnnnnnnnnnnnnnnnnnnnnnnnnnnnnnnnnnnnnnnnnnnnnnnnnnnnnnnnnnnnnnnnnnnnnnnnnnnnnnnnnnnnnnnnnnnnnnnnnnnnnnnnnnnnnnnnnnnnnnnnnnnnnnnnnnnnnnnnnnnnnnnnnnnnnnnnnnnnnnnnnnnnnnnnnnnnnnnnnnnnnnnnnnnnnnnnnnnnnnnnnnnnnnnnnnnnnnnnnnnnnnnnnnnnnnnnnnnnnnnnnnnnnnnnnnnnnnnnnnnnnnnnnnnnnnnnnnnnnnnnnnnnnnnnnnnnnnnnnnnnnnnnnnnnnnnnnnnnnnnnnnnnnnnnnnnnnnnnnnnnnnnnnnnnnnnnnnnnnnnnnnnnnnnnnnnnnnnnnnnnnnnnnnnnnnnnnnnnnnnnnnnnnnnnnnnnnnnnnnnnnnnnnnnnnnnnnnnnnnnnnnnnnnnnnnnnnnnnnnnnnnnnnnnnnnnnnnnnnnnnnnnnnnnnnnnnnnnnnnnnnnnnnnnnnnnnnnnnnnnnnnnnnnnnnnnnnnnnnnnnnnnnnnnnnnnnnnnnnnnnnnnnnnnnnnnnnnnnnnnnnnnnnnnnnnnnnnnnnnnnnnnnnnnnnnnnnnnnnnnnnnnnnnnnnnnnnnnnnnnnnnnnnnnnnnnnnnnnnnnnnnnnnnnnnnnnnnnnnnnnnnnnnnnnnnnnnnnnnnnnnnnnnnnnnnnnnnnnnnnnnnnnnnnnnnnnnnnnnnnnnnnnnnnnnnnnnnnnnnnnnnnnnnnnnnnnnnnnnnnnnnnnnnnnnnnnnnnnnnnnnnnnnnnnnnnnnnnnnnnnnnnnnnnnnnnnnnnnnnnnnnnnnnnnnnnnnnnnnnnnnnnnnnnnnnnnnnnnnnnnnnnnnnnnnnnnnnnnnnnnnnnnnnnnnnnnnnnnnnnnnnnnnnnnnnnnnnnnnnnnnnnnnnnnnnnnnnnnnnnnnnnnnnnnnnnnnnnnnnnnnnnnnnnnnnnnnnnnnnnnnnnnnnnnnnnnnnnnnnnnnnnnnnnnnnnnnnnnnnnnnnnnnnnnnnnnnnnnnnnnnnnnnnnnnnnnnnnnnnnnnnnnnnnnnnnnnnnnnnnnnnnnnnnnnnnnnnnnnnnnnnnnnnnnnnnnnnnnnnnnnnnnnnnnnnnnnnnnnnnnnnnnnnnnnnnnnnnnnnnnnnnnnnnnnnnnnnnnnnnnnnnnnnnnnnnnnnnnnnnnnnnnnnnnnnnnnnnnnnnnnnnnnnnnnnnnnnnnnnnnnnnnnnnnnnnnnnnnnnnnnnnnnnnnnnnnnnnnnnnnnnnnnnnnnnnnnnnnnnnnnnnnnnnnnnnnnnnnnnnnnnnnnnnnnnnnnnnnnnnnnnnnnnnnnnnnnnnnnnnnnnnnnnnnnnnnnnnnnnnnnnnnnnnnnnnnnnnnnnnnnnnnnnnnnnnnnnnnnnnnnnnnnnnnnnnnnnnnnnnnnnnnnnnnnnnnnnnnnnnnnnnnnnnnnnnnnnnnnnnnnnnnnnnnnnnnnnnnnnnnnnnnnnnnnnnnnnnnnnnnnnnnnnnnnnnnnnnnnnnnnnnnnnnnnnnnnnnnnnnnnnnnnnnnnnnnnnnnnnnnnnnnnnnnnnnnnnnnnnnnnnnnnnnnnnnnnnnnnnnnnnnnnnnnnnnnnnnnnnnnnnnnnnnnnnnnnnnnnnnnnnnnnnnnnnnnnnnnnnnnnnnnnnnnnnnnnnnnnnnnnnnnnnnnnnnnnnnnnnnnnnnnnnnnnnnnnnnnnnnnnnnnnnnnnnnnnnnnnnnnnnnnnnnnnnnnnnnnnnnnnnnnnnnnnnnnnnnnnnnnnnnnnnnnnnnnnnnnnnnnnnnnnnnnnnnnnnnnnnnnnnnnnnnnnnnnnnnnnnnnnnnnnnnnnnnnnnnnnnnnnnnnnnnnnnnnnnnnnnnnnnnnnnnnnnnnnnnnnnnnnnnnnnnnnnnnnnnnnnnnnnnnnnnnnnnnnnnnnnnnnnnnnnnnnnnnnnnnnnnnnnnnnnnnnnnnnnnnnnnnnnnnnnnnnnnnnnnnnnnnnnnnnnnnnnnnnnnnnnnnnnnnnnnnnnnnnnnnnnnnnnnnnnnnnnnnnnnnnnnnnnnnnnnnnnnnnnnnnnnnnnnnnnnnnnnnnnnnnnnnnnnnnnnnnnnnnnnnnnnnnnnnnnnnnnnnnnnnnnnnnnnnnnnnnnnnnnnnnnnnnnnnnnnnnnnnnnnnnnnnnnnnnnnnnnnnnnnnnnnnnnnnnnnnnnnnnnnnnnnnnnnnnnnnnnnnnnnnnnnnnnnnnnnnnnnnnnnnnnnnnnnnnnnnnnnnnnnnnnnnnnnnnnnnnnnnnnnnnnnnnnnnnnnnnnnnnnnnnnnnnnnnnnnnnnnnnnnnnnnnnnnnnnnnnnnnnnnnnnnnnnnnnnnnnnnnnnnnnnnnnnnnnnnnnnnnnnnnnnnnnnnnnnnnnnnnnnnnnnnnnnnnnnnnnnnnnnnnnnnnnnnnnnnnnnnnnnnnnnnnnnnnnnnnnnnnnnnnnnnnnnnnnnnnnnnnnnnnnnnnnnnnnnnnnnnnnnnnnnnnnnnnnnnnnnnnnnnnnnnnnnnnnnnnnnnnnnnnnnnnnnnnnnnnnnnnnnnnnnnnnnnnnnnnnnnnnnnnnnnnnnnnnnnnnnnnnnnnnnnnnnnnnnnnnnnnnnnnnnnnnnnnnnnnnnnnnnnnnnnnnnnnnnnnnnnnnnnnnnnnnnnnnnnnnnnnnnnnnnnnnnnnnnnnnnnnnnnnnnnnnnnnnnnnnnnnnnnnnnnnnnnnnnnnnnnnnnnnnnnnnnnnnnnnnnnnnnnnnnnnnnnnnnnnnnnnnnnnnnnnnnnnnnnnnnnnnnnnnnnnnnnnnnnnnnnnnnnnnnnnnnnnnnnnnnnnnnnnnnnnnnnnnnnnnnnnnnnnnnnnnnnnnnnnnnnnnnnnnnnnnnnnnnnnnnnnnnnnnnnnnnnnnnnnnnnnnnnnnnnnnnnnnnnnnnnnnnnnnnnnnnnnnnnnnnnnnnnnnnnnnnnnnnnnnnnnnnnnnnnnnnnnnnnnnnnnnnnnnnnnnnnnnnnnnnnnnnnnnnnnnnnnnnnnnnnnnnnnnnnnnnnnnnnnnnnnnnnnnnnnnnnnnnnnnnnnnnnnnnnnnnnnnnnnnnnnnnnnnnnnnnnnnnnnnnnnnnnnnnnnnnnnnnnnnnnnnnnnnnnnnnnnnnnnnnnnnnnnnnnnnnnnnnnnnnnnnnnnnnnnnnnnnnnnnnnnnnnnnnnnnnnnnnnnnnnnnnnnnnnnnnnnnnnnnnnnnnnnnnnnnnnnnnnnnnnnnnnnnnnnnnnnnnnnnnnnnnnnnnnnnnnnnnnnnnnnnnnnnnnnnnnnnnnnnnnnnnnnnnnnnnnnnnnnnnnnnnnnnnnnnnnnnnnnnnnnnnnnnnnnnnnnnnnnnnnnnnnnnnnnnnnnnnnnnnnnnnnnnnnnnnnnnnnnnnnnnnnnnnnnnnnnnnnnnnnnnnnnnnnnnnnnnnnnnnnnnnnnnnnnnnnnnnnnnnnnnnnnnnnnnnnnnnnnnnnnnnnnnnnnnnnnnnnnnnnnnnnnnnnnnnnnnnnnnnnnnnnnnnnnnnnnnnnnnnnnnnnnnnnnnnnnnnnnnnnnnnnnnnnnnnnnnnnnnnnnnnnnnnnnnnnnnnnnnnnnnnnnnnnnnnnnnnnnnnnnnnnnnnnnnnnnnnnnnnnnnnnnnnnnnnnnnnnnnnnnnnnnnnnnnnnnnnnnnnnnnnnnnnnnnnnnnnnnnnnnnnnnnnnnnnnnnnnnnnnnnnnnnnnnnnnnnnnnnnnnnnnnnnnnnnnnnnnnnnnnnnnnnnnnnnnnnnnnnnnnnnnnnnnnnnnnnnnnnnnnnnnnnnnnnnnnnnnnnnnnnnnnnnnnnnnnnnnnnnnnnnnnnnnnnnnnnnnnnnnnnnnnnnnnnnnnnnnnnnnnnnnnnnnnnnnnnnnnnnnnnnnnnnnnnnnnnnnnnnnnnnnnnnnnnnnnnnnnnnnnnnnnnnnnnnnnnnnnnnnnnnnnnnnnnnnnnnnnnnnnnnnnnnnnnnnnnnnnnnnnnnnnnnnnnnnnnnnnnnnnnnnnnnnnnnnnnnnnnnnnnnnnnnnnnnnnnnnnnnnnnnnnnnnnnnnnnnnnnnnnnnnnnnnnnnnnnnnnnnnnnnnnnnnnnnnnnnnnnnnnnnnnnnnnnnnnnnnnnnnnnnnnnnnnnnnnnnnnnnnnnnnnnnnnnnnnnnnnnnnnnnnnnnnnnnnnnnnnnnnnnnnnnnnnnnnnnnnnnnnnnnnnnnnnnnnnnnnnnnnnnnnnnnnnnnnnnnnnnnnnnnnnnnnnnnnnnnnnnnnnnnnnnnnnnnnnnnnnnnnnnnnnnnnnnnnnnnnnnnnnnnnnnnnnnnnnnnnnnnnnnnnnnnnnnnnnnnnnnnnnnnnnnnnnnnnnnnnnnnnnnnnnnnnnnnnnnnnnnnnnnnnnnnnnnnnnnnnnnnnnnnnnnnnnnnnnnnnnnnnnnnnnnnnnnnnnnnnnnnnnnnnnnnnnnnnnnnnnnnnnnnnnnnnnnnnnnnnnnnnnnnnnnnnnnnnnnnnnnnnnnnnnnnnnnnnnnnnnnnnnnnnnnnnnnnnnnnnnnnnnnnnnnnnnnnnnnnnnnnnnnnnnnnnnnnnnnnnnnnnnnnnnnnnnnnnnnnnnnnnnnnnnnnnnnnnnnnnnnnnnnnnnnnnnnnnnnnnnnnnnnnnnnnnnnnnnnnnnnnnnnnnnnnnnnnnnnnnnnnnnnnnnnnnnnnnnnnnnnnnnnnnnnnnnnnnnnnnnnnnnnnnnnnnnnnnnnnnnnnnnnnnnnnnnnnnnnnnnnnnnnnnnnnnnnnnnnnnnnnnnnnnnnnnnnnnnnnnnnnnnnnnnnnnnnnnnnnnnnnnnnnnnnnnnnnnnnnnnnnnnnnnnnnnnnnnnnnnnnnnnnnnnnnnnnnnnnnnnnnnnnnnnnnnnnnnnnnnnnnnnnnnnnnnnnnnnnnnnnnnnnnnnnnnnnnnnnnnnnnnnnnnnnnnnnnnnnnnnnnnnnnnnnnnnnnnnnnnnnnnnnnnnnnnnnnnnnnnnnnnnnnnnnnnnnnnnnnnnnnnnnnnnnnnnnnnnnnnnnnnnnnnnnnnnnnnnnnnnnnnnnnnnnnnnnnnnnnnnnnnnnnnnnnnnnnnnnnnnnnnnnnnnnnnnnnnnnnnnnnnnnnnnnnnnnnnnnnnnnnnnnnnnnnnnnnnnnnnnnnnnnnnnnnnnnnnnnnnnnnnnnnnnnnnnnnnnnnnnnnnnnnnnnnnnnnnnnnnnnnnnnnnnnnnnnnnnnnnnnnnnnnnnnnnnnnnnnnnnnnnnnnnnnnnnnnnnnnnnnnnnnnnnnnnnnnnnnnnnnnnnnnnnnnnnnnnnnnnnnnnnnnnnnnnnnnnnnnnnnnnnnnnnnnnnnnnnnnnnnnnnnnnnnnnnnnnnnnnnnnnnnnnnnnnnnnnnnnnnnnnnnnnnnnnnnnnnnnnnnnnnnnnnnnnnnnnnnnnnnnnnnnnnnnnnnnnnnnnnnnnnnnnnnnnnnnnnnnnnnnnnnnnnnnnnnnnnnnnnnnnnnnnnnnnnnnnnnnnnnnnnnnnnnnnnnnnnnnnnnnnnnnnnnnnnnnnnnnnnnnnnnnnnnnnnnnnnnnnnnnnnnnnnnnnnnnnnnnnnnnnnnnnnnnnnnnnnnnnnnnnnnnnnnnnnnnnnnnnnnnnnnnnnnnnnnnnnnnnnnnnnnnnnnnnnnnnnnnnnnnnnnnnnnnnnnnnnnnnnnnnnnnnnnnnnnnnnnnnnnnnnnnnnnnnnnnnnnnnnnnnnnnnnnnnnnnnnnnnnnnnnnnnnnnnnnnnnnnnnnnnnnnnnnnnnnnnnnnnnnnnnnnnnnnnnnnnnnnnnnnnnnnnnnnnnnnnnnnnnnnnnnnnnnnnnnnnnnnnnnnnnnnnnnnnnnnnnnnnnnnnnnnnnnnnnnnnnnnnnnnnnnnnnnnnnnnnnnnnnnnnnnnnnnnnnnnnnnnnnnnnnnnnnnnnnnnnnnnnnnnnnnnnnnnnnnnnnnnnnnnnnnnnnnnnnnnnnnnnnnnnnnnnnnnnnnnnnnnnnnnnnnnnnnnnnnnnnnnnnnnnnnnnnnnnnnnnnnnnnnnnnnnnnnnnnnnnnnnnnnnnnnnnnnnnnnnnnnnnnnnnnnnnnnnnnnnnnnnnnnnnnnnnnnnnnnnnnnnnnnnnnnnnnnnnnnnnnnnnnnnnnnnnnnnnnnnnnnnnnnnnnnnnnnnnnnnnnnnnnnnnnnnnnnnnnnnnnnnnnnnnnnnnnnnnnnnnnnnnnnnnnnnnnnnnnnnnnnnnnnnnnnnnnnnnnnnnnnnnnnnnnnnnnnnnnnnnnnnnnnnnnnnnnnnnnnnnnnnnnnnnnnnnnnnnnnnnnnnnnnnnnnnnnnnnnnnnnnnnnnnnnnnnnnnnnnnnnnnnnnnnnnnnnnnnnnnnnnnnnnnnnnnnnnnnnnnnnnnnnnnnnnnnnnnnnnnnnnnnnnnnnnnnnnnnnnnnnnnnnnnnnnnnnnnnnnnnnnnnnnnnnnnnnnnnnnnnnnnnnnnnnnnnnnnnnnnnnnnnnnnnnnnnnnnnnnnnnnnnnnnnnnnnnnnnnnnnnnnnnnnnnnnnnnnnnnnnnnnnnnnnnnnnnnnnnnnnnnnnnnnnnnnnnnnnnnnnnnnnnnnnnnnnnnnnnnnnnnnnnnnnnnnnnnnnnnnnnnnnnnnnnnnnnnnnnnnnnnnnnnnnnnnnnnnnnnnnnnnnnnnnnnnnnnnnnnnnnnnnnnnnnnnnnnnnnnnnnnnnnnnnnnnnnnnnnnnnnnnnnnnnnnnnnnnnnnnnnnnnnnnnnnnnnnnnnnnnnnnnnnnnnnnnnnnnnnnnnnnnnnnnnnnnnnnnnnnnnnnnnnnnnnnnnnnnnnnnnnnnnnnnnnnnnnnnnnnnnnnnnnnnnnnnnnnnnnnnnnnnnnnnnnnnnnnnnnnnnnnnnnnnnnnnnnnnnnnnnnnnnnnnnnnnnnnnnnnnnnnnnnnnnnnnnnnnnnnnnnnnnnnnnnnnnnnnnnnnnnnnnnnnnnnnnnnnnnnnnnnnnnnnnnnnnnnnnnnnnnnnnnnnnnnnnnnnnnnnnnnnnnnnnnnnnnnnnnnnnnnnnnnnnnnnnnnnnnnnnnnnnnnnnnnnnnnnnnnnnnnnnnnnnnnnnnnnnnnnnnnnnnnnnnnnnnnnnnnnnnnnnnnnnnnnnnnnnnnnnnnnnnnnnnnnnnnnnnnnnnnnnnnnnnnnnnnnnnnnnnnnnnnnnnnnnnnnnnnnnnnnnnnnnnnnnnnnnnnnnnnnnnnnnnnnnnnnnnnnnnnnnnnnnnnnnnnnnnnnnnnnnnnnnnnnnnnnnnnnnnnnnnnnnnnnnnnnnnnnnnnnnnnnnnnnnnnnnnnnnnnnnnnnnnnnnnnnnnnnnnnnnnnnnnnnnnnnnnnnnnnnnnnnnnnnnnnnnnnnnnnnnnnnnnnnnnnnnnnnnnnnnnnnnnnnnnnnnnnnnnnnnnnnnnnnnnnnnnnnnnnnnnnnnnnnnnnnnnnnnnnnnnnnnnnnnnnnnnnnnnnnnnnnnnnnnnnnnnnnnnnnnnnnnnnnnnnnnnnnnnnnnnnnnnnnnnnnnnnnnnnnnnnnnnnnnnnnnnnnnnnnnnnnnnnnnnnnnnnnnnnnnnnnnnnnnnnnnnnnnnnnnnnnnnnnnnnnnnnnnnnnnnnnnnnnnnnnnnnnnnnnnnnnnnnnnnnnnnnnnnnnnnnnnnnnnnnnnnnnnnnnnnnnnnnnnnnnnnnnnnnnnnnnnnnnnnnnnnnnnnnnnnnnnnnnnnnnnnnnnnnnnnnnnnnnnnnnnnnnnnnnnnnnnnnnnnnnnnnnnnnnnnnnnnnnnnnnnnnnnnnnnnnnnnnnnnnnnnnnnnnnnnnnnnnnnnnnnnnnnnnnnnnnnnnnnnnnnnnnnnnnnnnnnnnnnnnnnnnnnnnnnnnnnnnnnnnnnnnnnnnnnnnnnnnnnnnnnnnnnnnnnnnnnnnnnnnnnnnnnnnnnnnnnnnnnnnnnnnnnnnnnnnnnnnnnnnnnnnnnnnnnnnnnnnnnnnnnnnnnnnnnnnnnnnnnnnnnnnnnnnnnnnnnnnnnnnnnnnnnnnnnnnnnnnnnnnnnnnnnnnnnnnnnnnnnnnnnnnnnnnnnnnnnnnnnnnnnnnnnnnnnnnnnnnnnnnnnnnnnnnnnnnnnnnnnnnnnnnnnnnnnnnnnnnnnnnnnnnnnnnnnnnnnnnnnnnnnnnnnnnnnnnnnnnnnnnnnnnnnnnnnnnnnnnnnnnnnnnnnnnnnnnnnnnnnnnnnnnnnnnnnnnnnnnnnnnnnnnnnnnnnnnnnnnnnnnnnnnnnnnnnnnnnnnnnnnnnnnnnnnnnnnnnnnnnnnnnnnnnnnnnnnnnnnnnnnnnnnnnnnnnnnnnnnnnnnnnnnnnnnnnnnnnnnnnnnnnnnnnnnnnnnnnnnnnnnnnnnnnnnnnnnnnnnnnnnnnnnnnnnnnnnnnnnnnnnnnnnnnnnnnnnnnnnnnnnnnnnnnnnnnnnnnnnnnnnnnnnnnnnnnnnnnnnnnnnnnnnnnnnnnnnnnnnnnnnnnnnnnnnnnnnnnnnnnnnnnnnnnnnnnnnnnnnnnnnnnnnnnnnnnnnnnnnnnnnnnnnnnnnnnnnnnnnnnnnnnnnnnnnnnnnnnnnnnnnnnnnnnnnnnnnnnnnnnnnnnnnnnnnnnnnnnnnnnnnnnnnnnnnnnnnnnnnnnnnnnnnnnnnnnnnnnnnnnnnnnnnnnnnnnnnnnnnnnnnnnnnnnnnnnnnnnnnnnnnnnnnnnnnnnnnnnnnnnnnnnnnnnnnnnnnnnnnnnnnnnnnnnnnnnnnnnnnnnnnnnnnnnnnnnnnnnnnnnnnnnnnnnnnnnnnnnnnnnnnnnnnnnnnnnnnnnnnnnnnnnnnnnnnnnnnnnnnnnnnnnnnnnnnnnnnnnnnnnnnnnnnnnnnnnnnnnnnnnnnnnnnnnnnnnnnnnnnnnnnnnnnnnnnnnnnnnnnnnnnnnnnnnnnnnnnnnnnnnnnnnnnnnnnnnnnnnnnnnnnnnnnnnnnnnnnnnnnnnnnnnnnnnnnnnnnnnnnnnnnnnnnnnnnnnnnnnnnnnnnnnnnnnnnnnnnnnnnnnnnnnnnnnnnnnnnnnnnnnnnnnnnnnnnnnnnnnnnnnnnnnnnnnnnnnnnnnnnnnnnnnnnnnnnnnnnnnnnnnnnnnnnnnnnnnnnnnnnnnnnnnnnnnnnnnnnnnnnnnnnnnnnnnnnnnnnnnnnnnnnnnnnnnnnnnnnnnnnnnnnnnnnnnnnnnnnnnnnnnnnnnnnnnnnnnnnnnnnnnnnnnnnnnnnnnnnnnnnnnnnnnnnnnnnnnnnnnnnnnnnnnnnnnnnnnnnnnnnnnnnnnnnnnnnnnnnnnnnnnnnnnnnnnnnnnnnnnnnnnnnnnnnnnnnnnnnnnnnnnnnnnnnnnnnnnnnnnnnnnnnnnnnnnnnnnnnnnnnnnnnnnnnnnnnnnnnnnnnnnnnnnnnnnnnnnnnnnnnnnnnnnnnnnnnnnnnnnnnnnnnnnnnnnnnnnnnnnnnnnnnnnnnnnnnnnnnnnnnnnnnnnnnnnnnnnnnnnnnnnnnnnnnnnnnnnnnnnnnnnnnnnnnnnnnnnnnnnnnnnnnnnnnnnnnnnnnnnnnnnnnnnnnnnnnnnnnnnnnnnnnnnnnnnnnnnnnnnnnnnnnnnnnnnnnnnnnnnnnnnnnnnnnnnnnnnnnnnnnnnnnnnnnnnnnnnnnnnnnnnnnnnnnnnnnnnnnnnnnnnnnnnnnnnnnnnnnnnnnnnnnnnnnnnnnnnnnnnnnnnnnnnnnnnnnnnnnnnnnnnnnnnnnnnnnnnnnnnnnnnnnnnnnnnnnnnnnnnnnnnnnnnnnnnnnnnnnnnnnnnnnnnnnnnnnnnnnnnnnnnnnnnnnnnnnnnnnnnnnnnnnnnnnnnnnnnnnnnnnnnnnnnnnnnnnnnnnnnnnnnnnnnnnnnnnnnnnnnnnnnnnnnnnnnnnnnnnnnnnnnnnnnnnnnnnnnnnnnnnnnnnnnnnnnnnnnnnnnnnnnnnnnnnnnnnnnnnnnnnnnnnnnnnnnnnnnnnnnnnnnnnnnnnnnnnnnnnnnnnnnnnnnnnnnnnnnnnnnnnnnnnnnnnnnnnnnnnnnnnnnnnnnnnnnnnnnnnnnnnnnnnnnnnnnnnnnnnnnnnnnnnnnnnnnnnnnnnnnnnnnnnnnnnnnnnnnnnnnnnnnnnnnnnnnnnnnnnnnnnnnnnnnnnnnnnnnnnnnnnnnnnnnnnnnnnnnnnnnnnnnnnnnnnnnnnnnnnnnnnnnnnnnnnnnnnnnnnnnnnnnnnnnnnnnnnnnnnnnnnnnnnnnnnnnnnnnnnnnnnnnnnnnnnnnnnnnnnnnnnnnnnnnnnnnnnnnnnnnnnnnnnnnnnnnnnnnnnnnnnnnnnnnnnnnnnnnnnnnnnnnnnnnnnnnnnnnnnnnnnnnnnnnnnnnnnnnnnnnnnnnnnnnnnnnnnnnnnnnnnnnnnnnnnnnnnnnnnnnnnnnnnnnnnnnnnnnnnnnnnnnnnnnnnnnnnnnnnnnnnnnnnnnnnnnnnnnnnnnnnnnnnnnnnnnnnnnnnnnnnnnnnnnnnnnnnnnnnnnnnnnnnnnnnnnnnnnnnnnnnnnnnnnnnnnnnnnnnnnnnnnnnnnnnnnnnnnnnnnnnnnnnnnnnnnnnnnnnnnnnnnnnnnnnnnnnnnnnnnnnnnnnnnnnnnnnnnnnnnnnnnnnnnnnnnnnnnnnnnnnnnnnnnnnnnnnnnnnnnnnnnnnnnnnnnnnnnnnnnnnnnnnnnnnnnnnnnnnnnnnnnnnnnnnnnnnnnnnnnnnnnnnnnnnnnnnnnnnnnnnnnnnnnnnnnnnnnnnnnnnnnnnnnnnnnnnnnnnnnnnnnnnnnnnnnnnnnnnnnnnnnnnnnnnnnnnnnnnnnnnnnnnnnnnnnnnnnnnnnnnnnnnnnnnnnnnnnnnnnnnnnnnnnnnnnnnnnnnnnnnnnnnnnnnnnnnnnnnnnnnnnnnnnnnnnnnnnnnnnnnnnnnnnnnnnnnnnnnnnnnnnnnnnnnnnnnnnnnnnnnnnnnnnnnnnnnnnnnnnnnnnnnnnnnnnnnnnnnnnnnnnnnnnnnnnnnnnnnnnnnnnnnnnnnnnnnnnnnnnnnnnnnnnnnnnnnnnnnnnnnnnnnnnnnnnnnnnnnnnnnnnnnnnnnnnnnnnnnnnnnnnnnnnnnnnnnnnnnnnnnnnnnnnnnnnnnnnnnnnnnnnnnnnnnnnnnnnnnnnnnnnnnnnnnnnnnnnnnnnnnnnnnnnnnnnnnnnnnnnnnnnnnnnnnnnnnnnnnnnnnnnnnnnnnnnnnnnnnnnnnnnnnnnnnnnnnnnnnnnnnnnnnnnnnnnnnnnnnnnnnnnnnnnnnnnnnnnnnnnnnnnnnnnnnnnnnnnnnnnnnnnnnnnnnnnnnnnnnnnnnnnnnnnnnnnnnnnnnnnnnnnnnnnnnnnnnnnnnnnnnnnnnnnnnnnnnnnnnnnnnnnnnnnnnnnnnnnnnnnnnnnnnnnnnnnnnnnnnnnnnnnnnnnnnnnnnnnnnnnnnnnnnnnnnnnnnnnnnnnnnnnnnnnnnnnnnnnnnnnnnnnnnnnnnnnnnnnnnnnnnnnnnnnnnnnnnnnnnnnnnnnnnnnnnnnnnnnnnnnnnnnnnnnnnnnnnnnnnnnnnnnnnnnnnnnnnnnnnnnnnnnnnnnnnnnnnnnnnnnnnnnnnnnnnnnnnnnnnnnnnnnnnnnnnnnnnnnnnnnnnnnnnnnnnnnnnnnnnnnnnnnnnnnnnnnnnnnnnnnnnnnnnnnnnnnnnnnnnnnnnnnnnnnnnnnnnnnnnnnnnnnnnnnnnnnnnnnnnnnnnnnnnnnnnnnnnnnnnnnnnnnnnnnnnnnnnnnnnnnnnnnnnnnnnnnnnnnnnnnnnnnnnnnnnnnnnnnnnnnnnnnnnnnnnnnnnnnnnnnnnnnnnnnnnnnnnnnnnnnnnnnnnnnnnnnnnnnnnnnnnnnnnnnnnnnnnnnnnnnnnnnnnnnnnnnnnnnnnnnnnnnnnnnnnnnnnnnnnnnnnnnnnnnnnnnnnnnnnnnnnnnnnnnnnnnnnnnnnnnnnnnnnnnnnnnnnnnnnnnnnnnnnnnnnnnnnnnnnnnnnnnnnnnnnnnnnnnnnnnnnnnnnnnnnnnnnnnnnnnnnnnnnnnnnnnnnnnnnnnnnnnnnnnnnnnnnnnnnnnnnnnnnnnnnnnnnnnnnnnnnnnnnnnnnnnnnnnnnnnnnnnnnnnnnnnnnnnnnnnnnnnnnnnnnnnnnnnnnnnnnnnnnnnnnnnnnnnnnnnnnnnnnnnnnnnnnnnnnnnnnnnnnnnnnnnnnnnnnnnnnnnnnnnnnnnnnnnnnnnnnnnnnnnnnnnnnnnnnnnnnnnnnnnnnnnnnnnnnnnnnnnnnnnnnnnnnnnnnnnnnnnnnnnnnnnnnnnnnnnnnnnnnnnnnnnnnnnnnnnnnnnnnnnnnnnnnnnnnnnnnnnnnnnnnnnnnnnnnnnnnnnnnnnnnnnnnnnnnnnnnnnnnnnnnnnnnnnnnnnnnnnnnnnnnnnnnnnnnnnnnnnnnnnnnnnnnnnnnnnnnnnnnnnnnnnnnnnnnnnnnnnnnnnnnnnnnnnnnnnnnnnnnnnnnnnnnnnnnnnnnnnnnnnnnnnnnnnnnnnnnnnnnnnnnnnnnnnnnnnnnnnnnnnnnnnnnnnnnnnnnnnnnnnnnnnnnnnnnnnnnnnnnnnnnnnnnnnnnnnnnnnnnnnnnnnnnnnnnnnnnnnnnnnnnnnnnnnnnnnnnnnnnnnnnnnnnnnnnnnnnnnnnnnnnnnnnnnnnnnnnnnnnnnnnnnnnnnnnnnnnnnnnnnnnnnnnnnnnnnnnnnnnnnnnnnnnnnnnnnnnnnnnnnnnnnnnnnnnnnnnnnnnnnnnnnnnnnnnnnnnnnnnnnnnnnnnnnnnnnnnnnnnnnnnnnnnnnnnnnnnnnnnnnnnnnnnnnnnnnnnnnnnnnnnnnnnnnnnnnnnnnnnnnnnnnnnnnnnnnnnnnnnnnnnnnnnnnnnnnnnnnnnnnnnnnnnnnnnnnnnnnnnnnnnnnnnnnnnnnnnnnnnnnnnnnnnnnnnnnnnnnnnnnnnnnnnnnnnnnnnnnnnnnnnnnnnnnnnnnnnnnnnnnnnnnnnnnnnnnnnnnnnnnnnnnnnnnnnnnnnnnnnnnnnnnnnnnnnnnnnnnnnnnnnnnnnnnnnnnnnnnnnnnnnnnnnnnnnnnnnnnnnnnnnnnnnnnnnnnnnnnnnnnnnnnnnnnnnnnnnnnnnnnnnnnnnnnnnnnnnnnnnnnnnnnnnnnnnnnnnnnnnnnnnnnnnnnnnnnnnnnnnnnnnnnnnnnnnnnnnnnnnnnnnnnnnnnnnnnnnnnnnnnnnnnnnnnnnnnnnnnnnnnnnnnnnnnnnnnnnnnnnnnnnnnnnnnnnnnnnnnnnnnnnnnnnnnnnnnnnnnnnnnnnnnnnnnnnnnnnnnnnnnnnnnnnnnnnnnnnnnnnnnnnnnnnnnnnnnnnnnnnnnnnnnnnnnnnnnnnnnnnnnnnnnnnnnnnnnnnnnnnnnnnnnnnnnnnnnnnnnnnnnnnnnnnnnnnnnnnnnnnnnnnnnnnnnnnnnnnnnnnnnnnnnnnnnnnnnnnnnnnnnnnnnnnnnnnnnnnnnnnnnnnnnnnnnnnnnnnnnnnnnnnnnnnnnnnnnnnnnnnnnnnnnnnnnnnnnnnnnnnnnnnnnnnnnnnnnnnnnnnnnnnnnnnnnnnnnnnnnnnnnnnnnnnnnnnnnnnnnnnnnnnnnnnnnnnnnnnnnnnnnnnnnnnnnnnnnnnnnnnnnnnnnnnnnnnnnnnnnnnnnnnnnnnnnnnnnnnnnnnnnnnnnnnnnnnnnnnnnnnnnnnnnnnnnnnnnnnnnnnnnnnnnnnnnnnnnnnnnnnnnnnnnnnnnnnnnnnnnnnnnnnnnnnnnnnnnnnnnnnnnnnnnnnnnnnnnnnnnnnnnnnnnnnnnnnnnnnnnnnnnnnnnnnnnnnnnnnnnnnnnnnnnnnnnnnnnnnnnnnnnnnnnnnnnnnnnnnnnnnnnnnnnnnnnnnnnnnnnnnnnnnnnnnnnnnnnnnnnnnnnnnnnnnnnnnnnnnnnnnnnnnnnnnnnnnnnnnnnnnnnnnnnnnnnnnnnnnnnnnnnnnnnnnnnnnnnnnnnnnnnnnnnnnnnnnnnnnnnnnnnnnnnnnnnnnnnnnnnnnnnnnnnnnnnnnnnnnnnnnnnnnnnnnnnnnnnnnnnnnnnnnnnnnnnnnnnnnnnnnnnnnnnnnnnnnnnnnnnnnnnnnnnnnnnnnnnnnnnnnnnnnnnnnnnnnnnnnnnnnnnnnnnnnnnnnnnnnnnnnnnnnnnnnnnnnnnnnnnnnnnnnnnnnnnnnnnnnnnnnnnnnnnnnnnnnnnnnnnnnnnnnnnnnnnnnnnnnnnnnnnnnnnnnnnnnnnnnnnnnnnnnnnnnnnnnnnnnnnnnnnnnnnnnnnnnnnnnnnnnnnnnnnnnnnnnnnnnnnnnnnnnnnnnnnnnnnnnnnnnnnnnnnnnnnnnnnnnnnnnnnnnnnnnnnnnnnnnnnnnnnnnnnnnnnnnnnnnnnnnnnnnnnnnnnnnnnnnnnnnnnnnnnnnnnnnnnnnnnnnnnnnnnnnnnnnnnnnnnnnnnnnnnnnnnnnnnnnnnnnnnnnnnnnnnnnnnnnnnnnnnnnnnnnnnnnnnnnnnnnnnnnnnnnnnnnnnnnnnnnnnnnnnnnnnnnnnnnnnnnnnnnnnnnnnnnnnnnnnnnnnnnnnnnnnnnnnnnnnnnnnnnnnnnnnnnnnnnnnnnnnnnnnnnnnnnnnnnnnnnnnnnnnnnnnnnnnnnnnnnnnnnnnnnnnnnnnnnnnnnnnnnnnnnnnnnnnnnnnnnnnnnnnnnnnnnnnnnnnnnnnnnnnnnnnnnnnnnnnnnnnnnnnnnnnnnnnnnnnnnnnnnnnnnnnnnnnnnnnnnnnnnnnnnnnnnnnnnnnnnnnnnnnnnnnnnnnnnnnnnnnnnnnnnnnnnnnnnnnnnnnnnnnnnnnnnnnnnnnnnnnnnnnnnnnnnnnnnnnnnnnnnnnnnnnnnnnnnnnnnnnnnnnnnnnnnnnnnnnnnnnnnnnnnnnnnnnnnnnnnnnnnnnnnnnnnnnnnnnnnnnnnnnnnnnnnnnnnnnnnnnnnnnnnnnnnnnnnnnnnnnnnnnnnnnnnnnnnnnnnnnnnnnnnnnnnnnnnnnnnnnnnnnnnnnnnnnnnnnnnnnnnnnnnnnnnnnnnnnnnnnnnnnnnnnnnnnnnnnnnnnnnnnnnnnnnnnnnnnnnnnnnnnnnnnnnnnnnnnnnnnnnnnnnnnnnnnnnnnnnnnnnnnnnnnnnnnnnnnnnnnnnnnnnnnnnnnnnnnnnnnnnnnnnnnnnnnnnnnnnnnnnnnnnnnnnnnnnnnnnnnnnnnnnnnnnnnnnnnnnnnnnnnnnnnnnnnnnnnnnnnnnnnnnnnnnnnnnnnnnnnnnnnnnnnnnnnnnnnnnnnnnnnnnnnnnnnnnnnnnnnnnnnnnnnnnnnnnnnnnnnnnnnnnnnnnnnnnnnnnnnnnnnnnnnnnnnnnnnnnnnnnnnnnnnnnnnnnnnnnnnnnnnnnnnnnnnnnnnnnnnnnnnnnnnnnnnnnnnnnnnnnnnnnnnnnnnnnnnnnnnnnnnnnnnnnnnnnnnnnnnnnnnnnnnnnnnnnnnnnnnnnnnnnnnnnnnnnnnnnnnnnnnnnnnnnnnnnnnnnnnnnnnnnnnnnnnnnnnnnnnnnnnnnnnnnnnnnnnnnnnnnnnnnnnnnnnnnnnnnnnnnnnnnnnnnnnnnnnnnnnnnnnnnnnnnnnnnnnnnnnnnnnnnnnnnnnnnnnnnnnnnnnnnnnnnnnnnnnnnnnnnnnnnnnnnnnnnnnnnnnnnnnnnnnnnnnnnnnnnnnnnnnnnnnnnnnnnnnnnnnnnnnnnnnnnnnnnnnnnnnnnnnnnnnnnnnnnnnnnnnnnnnnnnnnnnnnnnnnnnnnnnnnnnnnnnnnnnnnnnnnnnnnnnnnnnnnnnnnnnnnnnnnnnnnnnnnnnnnnnnnnnnnnnnnnnnnnnnnnnnnnnnnnnnnnnnnnnnnnnnnnnnnnnnnnnnnnnnnnnnnnnnnnnnnnnnnnnnnnnnnnnnnnnnnnnnnnnnnnnnnnnnnnnnnnnnnnnnnnnnnnnnnnnnnnnnnnnnnnnnnnnnnnnnnnnnnnnnnnnnnnnnnnnnnnnnnnnnnnnnnnnnnnnnnnnnnnnnnnnnnnnnnnnnnnnnnnnnnnnnnnnnnnnnnnnnnnnnnnnnnnnnnnnnnnnnnnnnnnnnnnnnnnnnnnnnnnnnnnnnnnnnnnnnnnnnnnnnnnnnnnnnnnnnnnnnnnnnnnnnnnnnnnnnnnnnnnnnnnnnnnnnnnnnnnnnnnnnnnnnnnnnnnnnnnnnnnnnnnnnnnnnnnnnnnnnnnnnnnnnnnnnnnnnnnnnnnnnnnnnnnnnnnnnnnnnnnnnnnnnnnnnnnnnnnnnnnnnnnnnnnnnnnnnnnnnnnnnnnnnnnnnnnnnnnnnnnnnnnnnnnnnnnnnnnnnnnnnnnnnnnnnnnnnnnnnnnnnnnnnnnnnnnnnnnnnnnnnnnnnnnnnnnnnnnnnnnnnnnnnnnnnnnnnnnnnnnnnnnnnnnnnnnnnnnnnnnnnnnnnnnnnnnnnnnnnnnnnnnnnnnnnnnnnnnnnnnnnnnnnnnnnnnnnnnnnnnnnnnnnnnnnnnnnnnnnnnnnnnnnnnnnnnnnnnnnnnnnnnnnnnnnnnnnnnnnnnnnnnnnnnnnnnnnnnnnnnnnnnnnnnnnnnnnnnnnnnnnnnnnnnnnnnnnnnnnnnnnnnnnnnnnnnnnnnnnnnnnnnnnnnnnnnnnnnnnnnnnnnnnnnnnnnnnnnnnnnnnnnnnnnnnnnnnnnnnnnnnnnnnnnnnnnnnnnnnnnnnnnnnnnnnnnnnnnnnnnnnnnnnnnnnnnnnnnnnnnnnnnnnnnnnnnnnnnnnnnnnnnnnnnnnnnnnnnnnnnnnnnnnnnnnnnnnnnnnnnnnnnnnnnnnnnnnnnnnnnnnnnnnnnnnnnnnnnnnnnnnnnnnnnnnnnnnnnnnnnnnnnnnnnnnnnnnnnnnnnnnnnnnnnnnnnnnnnnnnnnnnnnnnnnnnnnnnnnnnnnnnnnnnnnnnnnnnnnnnnnnnnnnnnnnnnnnnnnnnnnnnnnnnnnnnnnnnnnnnnnnnnnnnnnnnnnnnnnnnnnnnnnnnnnnnnnnnnnnnnnnnnnnnnnnnnnnnnnnnnnnnnnnnnnnnnnnnnnnnnnnnnnnnnnnnnnnnnnnnnnnnnnnnnnnnnnnnnnnnnnnnnnnnnnnnnnnnnnnnnnnnnnnnnnnnnnnnnnnnnnnnnnnnnnnnnnnnnnnnnnnnnnnnnnnnnnnnnnnnnnnnnnnnnnnnnnnnnnnnnnnnnnnnnnnnnnnnnnnnnnnnnnnnnnnnnnnnnnnnnnnnnnnnnnnnnnnnnnnnnnnnnnnnnnnnnnnnnnnnnnnnnnnnnnnnnnnnnnnnnnnnnnnnnnnnnnnnnnnnnnnnnnnnnnnnnnnnnnnnnnnnnnnnnnnnnnnnnnnnnnnnnnnnnnnnnnnnnnnnnnnnnnnnnnnnnnnnnnnnnnnnnnnnnnnnnnnnnnnnnnnnnnnnnnnnnnnnnnnnnnnnnnnnnnnnnnnnnnnnnnnnnnnnnnnnnnnnnnnnnnnnnnnnnnnnnnnnnnnnnnnnnnnnnnnnnnnnnnnnnnnnnnnnnnnnnnnnnnnnnnnnnnnnnnnnnnnnnnnnnnnnnnnnnnnnnnnnnnnnnnnnnnnnnnnnnnnnnnnnnnnnnnnnnnnnnnnnnnnnnnnnnnnnnnnnnnnnnnnnnnnnnnnnnnnnnnnnnnnnnnnnnnnnnnnnnnnnnnnnnnnnnnnnnnnnnnnnnnnnnnnnnnnnnnnnnnnnnnnnnnnnnnnnnnnnnnnnnnnnnnnnnnnnnnnnnnnnnnnnnnnnnnnnnnnnnnnnnnnnnnnnnnnnnnnnnnnnnnnnnnnnnnnnnnnnnnnnnnnnnnnnnnnnnnnnnnnnnnnnnnnnnnnnnnnnnnnnnnnnnnnnnnnnnnnnnnnnnnnnnnnnnnnnnnnnnnnnnnnnnnnnnnnnnnnnnnnnnnnnnnnnnnnnnnnnnnnnnnnnnnnnnnnnnnnnnnnnnnnnnnnnnnnnnnnnnnnnnnnnnnnnnnnnnnnnnnnnnnnnnnnnnnnnnnnnnnnnnnnnnnnnnnnnnnnnnnnnnnnnnnnnnnnnnnnnnnnnnnnnnnnnnnnnnnnnnnnnnnnnnnnnnnnnnnnnnnnnnnnnnnnnnnnnnnnnnnnnnnnnnnnnnnnnnnnnnnnnnnnnnnnnnnnnnnnnnnnnnnnnnnnnnnnnnnnnnnnnnnnnnnnnnnnnnnnnnnnnnnnnnnnnnnnnnnnnnnnnnnnnnnnnnnnnnnnnnnnnnnnnnnnnnnnnnnnnnnnnnnnnnnnnnnnnnnnnnnnnnnnnnnnnnnnnnnnnnnnnnnnnnnnnnnnnnnnnnnnnnnnnnnnnnnnnnnnnnnnnnnnnnnnnnnnnnnnnnnnnnnnnnnnnnnnnnnnnnnnnnnnnnnnnnnnnnnnnnnnnnnnnnnnnnnnnnnnnnnnnnnnnnnnnnnnnnnnnnnnnnnnnnnnnnnnnnnnnnnnnnnnnnnnnnnnnnnnnnnnnnnnnnnnnnnnnnnnnnnnnnnnnnnnnnnnnnnnnnnnnnnnnnnnnnnnnnnnnnnnnnnnnnnnnnnnnnnnnnnnnnnnnnnnnnnnnnnnnnnnnnnnnnnnnnnnnnnnnnnnnnnnnnnnnnnnnnnnnnnnnnnnnnnnnnnnnnnnnnnnnnnnnnnnnnnnnnnnnnnnnnnnnnnnnnnnnnnnnnnnnnnnnnnnnnnnnnnnnnnnnnnnnnnnnnnnnnnnnnnnnnnnnnnnnnnnnnnnnnnnnnnnnnnnnnnnnnnnnnnnnnnnnnnnnnnnnnnnnnnnnnnnnnnnnnnnnnnnnnnnnnnnnnnnnnnnnnnnnnnnnnnnnnnnnnnnnnnnnnnnnnnnnnnnnnnnnnnnnnnnnnnnnnnnnnnnnnnnnnnnnnnnnnnnnnnnnnnnnnnnnnnnnnnnnnnnnnnnnnnnnnnnnnnnnnnnnnnnnnnnnnnnnnnnnnnnnnnnnnnnnnnnnnnnnnnnnnnnnnnnnnnnnnnnnnnnnnnnnnnnnnnnnnnnnnnnnnnnnnnnnnnnnnnnnnnnnnnnnnnnnnnnnnnnnnnnnnnnnnnnnnnnnnnnnnnnnnnnnnnnnnnnnnnnnnnnnnnnnnnnnnnnnnnnnnnnnnnnnnnnnnnnnnnnnnnnnnnnnnnnnnnnnnnnnnnnnnnnnnnnnnnnnnnnnnnnnnnnnnnnnnnnnnnnnnnnnnnnnnnnnnnnnnnnnnnnnnnnnnnnnnnnnnnnnnnnnnnnnnnnnnnnnnnnnnnnnnnnnnnnnnnnnnnnnnnnnnnnnnnnnnnnnnnnnnnnnnnnnnnnnnnnnnnnnnnnnnnnnnnnnnnnnnnnnnnnnnnnnnnnnnnnnnnnnnnnnnnnnnnnnnnnnnnnnnnnnnnnnnnnnnnnnnnnnnnnnnnnnnnnnnnnnnnnnnnnnnnnnnnnnnnnnnnnnnnnnnnnnnnnnnnnnnnnnnnnnnnnnnnnnnnnnnnnnnnnnnnnnnnnnnnnnnnnnnnnnnnnnnnnnnnnnnnnnnnnnnnnnnnnnnnnnnnnnnnnnnnnnnnnnnnnnnnnnnnnnnnnnnnnnnnnnnnnnnnnnnnnnnnnnnnnnnnnnnnnnnnnnnnnnnnnnnnnnnnnnnnnnnnnnnnnnnnnnnnnnnnnnnnnnnnnnnnnnnnnnnnnnnnnnnnnnnnnnnnnnnnnnnnnnnnnnnnnnnnnnnnnnnnnnnnnnnnnnnnnnnnnnnnnnnnnnnnnnnnnnnnnnnnnnnnnnnnnnnnnnnnnnnnnnnnnnnnnnnnnnnnnnnnnnnnnnnnnnnnnnnnnnnnnnnnnnnnnnnnnnnnnnnnnnnnnnnnnnnnnnnnnnnnnnnnnnnnnnnnnnnnnnnnnnnnnnnnnnnnnnnnnnnnnnnnnnnnnnnnnnnnnnnnnnnnnnnnnnnnnnnnnnnnnnnnnnnnnnnnnnnnnnnnnnnnnnnnnnnnnnnnnnnnnnnnnnnnnnnnnnnnnnnnnnnnnnnnnnnnnnnnnnnnnnnnnnnnnnnnnnnnnnnnnnnnnnnnnnnnnnnnnnnnnnnnnnnnnnnnnnnnnnnnnnnnnnnnnnnnnnnnnnnnnnnnnnnnnnnnnnnnnnnnnnnnnnnnnnnnnnnnnnnnnnnnnnnnnnnnnnnnnnnnnnnnnnnnnnnnnnnnnnnnnnnnnnnnnnnnnnnnnnnnnnnnnnnnnnnnnnnnnnnnnnnnnnnnnnnnnnnnnnnnnnnnnnnnnnnnnnnnnnnnnnnnnnnnnnnnnnnnnnnnnnnnnnnnnnnnnnnnnnnnnnnnnnnnnnnnnnnnnnnnnnnnnnnnnnnnnnnnnnnnnnnnnnnnnnnnnnnnnnnnnnnnnnnnnnnnnnnnnnnnnnnnnnnnnnnnnnnnnnnnnnnnnnnnnnnnnnnnnnnnnnnnnnnnnnnnnnnnnnnnnnnnnnnnnnnnnnnnnnnnnnnnnnnnnnnnnnnnnnnnnnnnnnnnnnnnnnnnnnnnnnnnnnnnnnnnnnnnnnnnnnnnnnnnnnnnnnnnnnnnnnnnnnnnnnnnnnnnnnnnnnnnnnnnnnnnnnnnnnnnnnnnnnnnnnnnnnnnnnnnnnnnnnnnnnnnnnnnnnnnnnnnnnnnnnnnnnnnnnnnnnnnnnnnnnnnnnnnnnnnnnnnnnnnnnnnnnnnnnnnnnnnnnnnnnnnnnnnnnnnnnnnnnnnnnnnnnnnnnnnnnnnnnnnnnnnnnnnnnnnnnnnnnnnnnnnnnnnnnnnnnnnnnnnnnnnnnnnnnnnnnnnnnnnnnnnnnnnnnnnnnnnnnnnnnnnnnnnnnnnnnnnnnnnnnnnnnnnnnnnnnnnnnnnnnnnnnnnnnnnnnnnnnnnnnnnnnnnnnnnnnnnnnnnnnnnnnnnnnnnnnnnnnnnnnnnnnnnnnnnnnnnnnnnnnnnnnnnnnnnnnnnnnnnnnnnnnnnnnnnnnnnnnnnnnnnnnnnnnnnnnnnnnnnnnnnnnnnnnnnnnnnnnnnnnnnnnnnnnnnnnnnnnnnnnnnnnnnnnnnnnnnnnnnnnnnnnnnnnnnnnnnnnnnnnnnnnnnnnnnnnnnnnnnnnnnnnnnnnnnnnnnnnnnnnnnnnnnnnnnnnnnnnnnnnnnnnnnnnnnnnnnnnnnnnnnnnnnnnnnnnnnnnnnnnnnnnnnnnnnnnnnnnnnnnnnnnnnnnnnnnnnnnnnnnnnnnnnnnnnnnnnnnnnnnnnnnnnnnnnnnnnnnnnnnnnnnnnnnnnnnnnnnnnnnnnnnnnnnnnnnnnnnnnnnnnnnnnnnnnnnnnnnnnnnnnnnnnnnnnnnnnnnnnnnnnnnnnnnnnnnnnnnnnnnnnnnnnnnnnnnnnnnnnnnnnnnnnnnnnnnnnnnnnnnnnnnnnnnnnnnnnnnnnnnnnnnnnnnnnnnnnnnnnnnnnnnnnnnnnnnnnnnnnnnnnnnnnnnnnnnnnnnnnnnnnnnnnnnnnnnnnnnnnnnnnnnnnnnnnnnnnnnnnnnnnnnnnnnnnnnnnnnnnnnnnnnnnnnnnnnnnnnnnnnnnnnnnnnnnnnnnnnnnnnnnnnnnnnnnnnnnnnnnnnnnnnnnnnnnnnnnnnnnnnnnnnnnnnnnnnnnnnnnnnnnnnnnnnnnnnnnnnnnnnnnnnnnnnnnnnnnnnnnnnnnnnnnnnnnnnnnnnnnnnnnnnnnnnnnnnnnnnnnnnnnnnnnnnnnnnnnnnnnnnnnnnnnnnnnnnnnnnnnnnnnnnnnnnnnnnnnnnnnnnnnnnnnnnnnnnnnnnnnnnnnnnnnnnnnnnnnnnnnnnnnnnnnnnnnnnnnnnnnnnnnnnnnnnnnnnnnnnnnnnnnnnnnnnnnnnnnnnnnnnnnnnnnnnnnnnnnnnnnnnnnnnnnnnnnnnnnnnnnnnnnnnnnnnnnnnnnnnnnnnnnnnnnnnnnnnnnnnnnnnnnnnnnnnnnnnnnnnnnnnnnnnnnnnnnnnnnnnnnnnnnnnnnnnnnnnnnnnnnnnnnnnnnnnnnnnnnnnnnnnnnnnnnnnnnnnnnnnnnnnnnnnnnnnnnnnnnnnnnnnnnnnnnnnnnnnnnnnnnnnnnnnnnnnnnnnnnnnnnnnnnnnnnnnnnnnnnnnnnnnnnnnnnnnnnnnnnnnnnnnnnnnnnnnnnnnnnnnnnnnnnnnnnnnnnnnnnnnnnnnnnnnnnnnnnnnnnnnnnnnnnnnnnnnnnnnnnnnnnnnnnnnnnnnnnnnnnnnnnnnnnnnnnnnnnnnnnnnnnnnnnnnnnnnnnnnnnnnnnnnnnnnnnnnnnnnnnnnnnnnnnnnnnnnnnnnnnnnnnnnnnnnnnnnnnnnnnnnnnnnnnnnnnnnnnnnnnnnnnnnnnnnnnnnnnnnnnnnnnnnnnnnnnnnnnnnnnnnnnnnnnnnnnnnnnnnnnnnnnnnnnnnnnnnnnnnnnnnnnnnnnnnnnnnnnnnnnnnnnnnnnnnnnnnnnnnnnnnnnnnnnnnnnnnnnnnnnnnnnnnnnnnnnnnnnnnnnnnnnnnnnnnnnnnnnnnnnnnnnnnnnnnnnnnnnnnnnnnnnnnnnnnnnnnnnnnnnnnnnnnnnnnnnnnnnnnnnnnnnnnnnnnnnnnnnnnnnnnnnnnnnnnnnnnnnnnnnnnnnnnnnnnnnnnnnnnnnnnnnnnnnnnnnnnnnnnnnnnnnnnnnnnnnnnnnnnnnnnnnnnnnnnnnnnnnnnnnnnnnnnnnnnnnnnnnnnnnnnnnnnnnnnnnnnnnnnnnnnnnnnnnnnnnnnnnnnnnnnnnnnnnnnnnnnnnnnnnnnnnnnnnnnnnnnnnnnnnnnnnnnnnnnnnnnnnnnnnnnnnnnnnnnnnnnnnnnnnnnnnnnnnnnnnnnnnnnnnnnnnnnnnnnnnnnnnnnnnnnnnnnnnnnnnnnnnnnnnnnnnnnnnnnnnnnnnnnnnnnnnnnnnnnnnnnnnnnnnnnnnnnnnnnnnnnnnnnnnnnnnnnnnnnnnnnnnnnnnnnnnnnnnnnnnnnnnnnnnnnnnnnnnnnnnnnnnnnnnnnnnnnnnnnnnnnnnnnnnnnnnnnnnnnnnnnnnnnnnnnnnnnnnnnnnnnnnnnnnnnnnnnnnnnnnnnnnnnnnnnnnnnnnnnnnnnnnnnnnnnnnnnnnnnnnnnnnnnnnnnnnnnnnnnnnnnnnnnnnnnnnnnnnnnnnnnnnnnnnnnnnnnnnnnnnnnnnnnnnnnnnnnnnnnnnnnnnnnnnnnnnnnnnnnnnnnnnnnnnnnnnnnnnnnnnnnnnnnnnnnnnnnnnnnnnnnnnnnnnnnnnnnnnnnnnnnnnnnnnnnnnnnnnnnnnnnnnnnnnnnnnnnnnnnnnnnnnnnnnnnnnnnnnnnnnnnnnnnnnnnnnnnnnnnnnnnnnnnnnnnnnnnnnnnnnnnnnnnnnnnnnnnnnnnnnnnnnnnnnnnnnnnnnnnnnnnnnnnnnnnnnnnnnnnnnnnnnnnnnnnnnnnnnnnnnnnnnnnnnnnnnnnnnnnnnnnnnnnnnnnnnnnnnnnnnnnnnnnnnnnnnnnnnnnnnnnnnnnnnnnnnnnnnnnnnnnnnnnnnnnnnnnnnnnnnnnnnnnnnnnnnnnnnnnnnnnnnnnnnnnnnnnnnnnnnnnnnnnnnnnnnnnnnnnnnnnnnnnnnnnnnnnnnnnnnnnnnnnnnnnnnnnnnnnnnnnnnnnnnnnnnnnnnnnnnnnnnnnnnnnnnnnnnnnnnnnnnnnnnnnnnnnnnnnnnnnnnnnnnnnnnnnnnnnnnnnnnnnnnnnnnnnnnnnnnnnnnnnnnnnnnnnnnnnnnnnnnnnnnnnnnnnnnnnnnnnnnnnnnnnnnnnnnnnnnnnnnnnnnnnnnnnnnnnnnnnnnnnnnnnnnnnnnnnnnnnnnnnnnnnnnnnnnnnnnnnnnnnnnnnnnnnnnnnnnnnnnnnnnnnnnnnnnnnnnnnnnnnnnnnnnnnnnnnnnnnnnnnnnnnnnnnnnnnnnnnnnnnnnnnnnnnnnnnnnnnnnnnnnnnnnnnnnnnnnnnnnnnnnnnnnnnnnnnnnnnnnnnnnnnnnnnnnnnnnnnnnnnnnnnnnnnnnnnnnnnnnnnnnnnnnnnnnnnnnnnnnnnnnnnnnnnnnnnnnnnnnnnnnnnnnnnnnnnnnnnnnnnnnnnnnnnnnnnnnnnnnnnnnnnnnnnnnnnnnnnnnnnnnnnnnnnnnnnnnnnnnnnnnnnnnnnnnnnnnnnnnnnnnnnnnnnnnnnnnnnnnnnnnnnnnnnnnnnnnnnnnnnnnnnnnnnnnnnnnnnnnnnnnnnnnnnnnnnnnnnnnnnnnnnnnnnnnnnnnnnnnnnnnnnnnnnnnnnnnnnnnnnnnnnnnnnnnnnnnnnnnnnnnnnnnnnnnnnnnnnnnnnnnnnnnnnnnnnnnnnnnnnnnnnnnnnnnnnnnnnnnnnnnnnnnnnnnnnnnnnnnnnnnnnnnnnnnnnnnnnnnnnnnnnnnnnnnnnnnnnnnnnnnnnnnnnnnnnnnnnnnnnnnnnnnnnnnnnnnnnnnnnnnnnnnnnnnnnnnnnnnnnnnnnnnnnnnnnnnnnnnnnnnnnnnnnnnnnnnnnnnnnnnnnnnnnnnnnnnnnnnnnnnnnnnnnnnnnnnnnnnnnnnnnnnnnnnnnnnnnnnnnnnnnnnnnnnnnnnnnnnnnnnnnnnnnnnnnnnnnnnnnnnnnnnnnnnnnnnnnnnnnnnnnnnnnnnnnnnnnnnnnnnnnnnnnnnnnnnnnnnnnnnnnnnnnnnnnnnnnnnnnnnnnnnnnnnnnnnnnnnnnnnnnnnnnnnnnnnnnnnnnnnnnnnnnnnnnnnnnnnnnnnnnnnnnnnnnnnnnnnnnnnnnnnnnnnnnnnnnnnnnnnnnnnnnnnnnnnnnnnnnnnnnnnnnnnnnnnnnnnnnnnnnnnnnnnnnnnnnnnnnnnnnnnnnnnnnnnnnnnnnnnnnnnnnnnnnnnnnnnnnnnnnnnnnnnnnnnnnnnnnnnnnnnnnnnnnnnnnnnnnnnnnnnnnnnnnnnnnnnnnnnnnnnnnnnnnnnnnnnnnnnnnnnnnnnnnnnnnnnnnnnnnnnnnnnnnnnnnnnnnnnnnnnnnnnnnnnnnnnnnnnnnnnnnnnnnnnnnnnnnnnnnnnnnnnnnnnnnnnnnnnnnnnnnnnnnnnnnnnnnnnnnnnnnnnnnnnnnnnnnnnnnnnnnnnnnnnnnnnnnnnnnnnnnnnnnnnnnnnnnnnnnnnnnnnnnnnnnnnnnnnnnnnnnnnnnnnnnnnnnnnnnnnnnnnnnnnnnnnnnnnnnnnnnnnnnnnnnnnnnnnnnnnnnnnnnnnnnnnnnnnnnnnnnnnnnnnnnnnnnnnnnnnnnnnnnnnnnnnnnnnnnnnnnnnnnnnnnnnnnnnnnnnnnnnnnnnnnnnnnnnnnnnnnnnnnnnnnnnnnnnnnnnnnnnnnnnnnnnnnnnnnnnnnnnnnnnnnnnnnnnnnnnnnnnnnnnnnnnnnnnnnnnnnnnnnnnnnnnnnnnnnnnnnnnnnnnnnnnnnnnnnnnnnnnnnnnnnnnnnnnnnnnnnnnnnnnnnnnnnnnnnnnnnnnnnnnnnnnnnnnnnnnnnnnnnnnnnnnnnnnnnnnnnnnnnnnnnnnnnnnnnnnnnnnnnnnnnnnnnnnnnnnnnnnnnnnnnnnnnnnnnnnnnnnnnnnnnnnnnnnnnnnnnnnnnnnnnnnnnnnnnnnnnnnnnnnnnnnnnnnnnnnnnnnnnnnnnnnnnnnnnnnnnnnnnnnnnnnnnnnnnnnnnnnnnnnnnnnnnnnnnnnnnnnnnnnnnnnnnnnnnnnnnnnnnnnnnnnnnnnnnnnnnnnnnnnnnnnnnnnnnnnnnnnnnnnnnnnnnnnnnnnnnnnnnnnnnnnnnnnnnnnnnnnnnnnnnnnnnnnnnnnnnnnnnnnnnnnnnnnnnnnnnnnnnnnnnnnnnnnnnnnnnnnnnnnnnnnnnnnnnnnnnnnnnnnnnnnnnnnnnnnnnnnnnnnnnnnnnnnnnnnnnnnnnnnnnnnnnnnnnnnnnnnnnnnnnnnnnnnnnnnnnnnnnnnnnnnnnnnnnnnnnnnnnnnnnnnnnnnnnnnnnnnnnnnnnnnnnnnnnnnnnnnnnnnnnnnnnnnnnnnnnnnnnnnnnnnnnnnnnnnnnnnnnnnnnnnnnnnnnnnnnnnnnnnnnnnnnnnnnnnnnnnnnnnnnnnnnnnnnnnnnnnnnnnnnnnnnnnnnnnnnnnnnnnnnnnnnnnnnnnnnnnnnnnnnnnnnnnnnnnnnnnnnnnnnnnnnnnnnnnnnnnnnnnnnnnnnnnnnnnnnnnnnnnnnnnnnnnnnnnnnnnnnnnnnnnnnnnnnnnnnnnnnnnnnnnnnnnnnnnnnnnnnnnnnnnnnnnnnnnnnnnnnnnnnnnnnnnnnnnnnnnnnnnnnnnnnnnnnnnnnnnnnnnnnnnnnnnnnnnnnnnnnnnnnnnnnnnnnnnnnnnnnnnnnnnnnnnnnnnnnnnnnnnnnnnnnnnnnnnnnnnnnnnnnnnnnnnnnnnnnnnnnnnnnnnnnnnnnnnnnnnnnnnnnnnnnnnnnnnnnnnnnnnnnnnnnnnnnnnnnnnnnnnnnnnnnnnnnnnnnnnnnnnnnnnnnnnnnnnnnnnnnnnnnnnnnnnnnnnnnnnnnnnnnnnnnnnnnnnnnnnnnnnnnnnnnnnnnnnnnnnnnnnnnnnnnnnnnnnnnnnnnnnnnnnnnnnnnnnnnnnnnnnnnnnnnnnnnnnnnnnnnnnnnnnnnnnnnnnnnnnnnnnnnnnnnnnnnnnnnnnnnnnnnnnnnnnnnnnnnnnnnnnnnnnnnnnnnnnnnnnnnnnnnnnnnnnnnnnnnnnnnnnnnnnnnnnnnnnnnnnnnnnnnnnnnnnnnnnnnnnnnnnnnnnnnnnnnnnnnnnnnnnnnnnnnnnnnnnnnnnnnnnnnnnnnnnnnnnnnnnnnnnnnnnnnnnnnnnnnnnnnnnnnnnnnnnnnnnnnnnnnnnnnnnnnnnnnnnnnnnnnnnnnnnnnnnnnnnnnnnnnnnnnnnnnnnnnnnnnnnnnnnnnnnnnnnnnnnnnnnnnnnnnnnnnnnnnnnnnnnnnnnnnnnnnnnnnnnnnnnnnnnnnnnnnnnnnnnnnnnnnnnnnnnnnnnnnnnnnnnnnnnnnnnnnnnnnnnnnnnnnnnnnnnnnnnnnnnnnnnnnnnnnnnnnnnnnnnnnnnnnnnnnnnnnnnnnnnnnnnnnnnnnnnnnnnnnnnnnnnnnnnnnnnnnnnnnnnnnnnnnnnnnnnnnnnnnnnnnnnnnnnnnnnnnnnnnnnnnnnnnnnnnnnnnnnnnnnnnnnnnnnnnnnnnnnnnnnnnnnnnnnnnnnnnnnnnnnnnnnnnnnnnnnnnnnnnnnnnnnnnnnnnnnnnnnnnnnnnnnnnnnnnnnnnnnnnnnnnnnnnnnnnnnnnnnnnnnnnnnnnnnnnnnnnnnnnnnnnnnnnnnnnnnnnnnnnnnnnnnnnnnnnnnnnnnnnnnnnnnnnnnnnnnnnnnnnnnnnnnnnnnnnnnnnnnnnnnnnnnnnnnnnnnnnnnnnnnnnnnnnnnnnnnnnnnnnnnnnnnnnnnnnnnnnnnnnnnnnnnnnnnnnnnnnnnnnnnnnnnnnnnnnnnnnnnnnnnnnnnnnnnnnnnnnnnnnnnnnnnnnnnnnnnnnnnnnnnnnnnnnnnnnnnnnnnnnnnnnnnnnnnnnnnnnnnnnnnnnnnnnnnnnnnnnnnnnnnnnnnnnnnnnnnnnnnnnnnnnnnnnnnnnnnnnnnnnnnnnnnnnnnnnnnnnnnnnnnnnnnnnnnnnnnnnnnnnnnnnnnnnnnnnnnnnnnnnnnnnnnnnnnnnnnnnnnnnnnnnnnnnnnnnnnnnnnnnnnnnnnnnnnnnnnnnnnnnnnnnnnnnnnnnnnnnnnnnnnnnnnnnnnnnnnnnnnnnnnnnnnnnnnnnnnnnnnnnnnnnnnnnnnnnnnnnnnnnnnnnnnnnnnnnnnnnnnnnnnnnnnnnnnnnnnnnnnnnnnnnnnnnnnnnnnnnnnnnnnnnnnnnnnnnnnnnnnnnnnnnnnnnnnnnnnnnnnnnnnnnnnnnnnnnnnnnnnnnnnnnnnnnnnnnnnnnnnnnnnnnnnnnnnnnnnnnnnnnnnnnnnnnnnnnnnnnnnnnnnnnnnnnnnnnnnnnnnnnnnnnnnnnnnnnnnnnnnnnnnnnnnnnnnnnnnnnnnnnnnnnnnnnnnnnnnnnnnnnnnnnnnnnnnnnnnnnnnnnnnnnnnnnnnnnnnnnnnnnnnnnnnnnnnnnnnnnnnnnnnnnnnnnnnnnnnnnnnnnnnnnnnnnnnnnnnnnnnnnnnnnnnnnnnnnnnnnnnnnnnnnnnnnnnnnnnnnnnnnnnnnnnnnnnnnnnnnnnnnnnnnnnnnnnnnnnnnnnnnnnnnnnnnnnnnnnnnnnnnnnnnnnnnnnnnnnnnnnnnnnnnnnnnnnnnnnnnnnnnnnnnnnnnnnnnnnnnnnnnnnnnnnnnnnnnnnnnnnnnnnnnnnnnnnnnnnnnnnnnnnnnnnnnnnnnnnnnnnnnnnnnnnnnnnnnnnnnnnnnnnnnnnnnnnnnnnnnnnnnnnnnnnnnnnnnnnnnnnnnnnnnnnnnnnnnnnnnnnnnnnnnnnnnnnnnnnnnnnnnnnnnnnnnnnnnnnnnnnnnnnnnnnnnnnnnnnnnnnnnnnnnnnnnnnnnnnnnnnnnnnnnnnnnnnnnnnnnnnnnnnnnnnnnnnnnnnnnnnnnnnnnnnnnnnnnnnnnnnnnnnnnnnnnnnnnnnnnnnnnnnnnnnnnnnnnnnnnnnnnnnnnnnnnnnnnnnnnnnnnnnnnnnnnnnnnnnnnnnnnnnnnnnnnnnnnnnnnnnnnnnnnnnnnnnnnnnnnnnnnnnnnnnnnnnnnnnnnnnnnnnnnnnnnnnnnnnnnnnnnnnnnnnnnnnnnnnnnnnnnnnnnnnnnnnnnnnnnnnnnnnnnnnnnnnnnnnnnnnnnnnnnnnnnnnnnnnnnnnnnnnnnnnnnnnnnnnnnnnnnnnnnnnnnnnnnnnnnnnnnnnnnnnnnnnnnnnnnnnnnnnnnnnnnnnnnnnnnnnnnnnnnnnnnnnnnnnnnnnnnnnnnnnnnnnnnnnnnnnnnnnnnnnnnnnnnnnnnnnnnnnnnnnnnnnnnnnnnnnnnnnnnnnnnnnnnnnnnnnnnnnnnnnnnnnnnnnnnnnnnnnnnnnnnnnnnnnnnnnnnnnnnnnnnnnnnnnnnnnnnnnnnnnnnnnnnnnnnnnnnnnnnnnnnnnnnnnnnnnnnnnnnnnnnnnnnnnnnnnnnnnnnnnnnnnnnnnnnnnnnnnnnnnnnnnnnnnnnnnnnnnnnnnnnnnnnnnnnnnnnnnnnnnnnnnnnnnnnnnnnnnnnnnnnnnnnnnnnnnnnnnnnnnnnnnnnnnnnnnnnnnnnnnnnnnnnnnnnnnnnnnnnnnnnnnnnnnnnnnnnnnnnnnnnnnnnnnnnnnnnnnnnnnnnnnnnnnnnnnnnnnnnnnnnnnnnnnnnnnnnnnnnnnnnnnnnnnnnnnnnnnnnnnnnnnnnnnnnnnnnnnnnnnnnnnnnnnnnnnnnnnnnnnnnnnnnnnnnnnnnnnnnnnnnnnnnnnnnnnnnnnnnnnnnnnnnnnnnnnnnnnnnnnnnnnnnnnnnnnnnnnnnnnnnnnnnnnnnnnnnnnnnnnnnnnnnnnnnnnnnnnnnnnnnnnnnnnnnnnnnnnnnnnnnnnnnnnnnnnnnnnnnnnnnnnnnnnnnnnnnnnnnnnnnnnnnnnnnnnnnnnnnnnnnnnnnnnnnnnnnnnnnnnnnnnnnnnnnnnnnnnnnnnnnnnnnnnnnnnnnnnnnnnnnnnnnnnnnnnnnnnnnnnnnnnnnnnnnnnnnnnnnnnnnnnnnnnnnnnnnnnnnnnnnnnnnnnnnnnnnnnnnnnnnnnnnnnnnnnnnnnnnnnnnnnnnnnnnnnnnnnnnnnnnnnnnnnnnnnnnnnnnnnnnnnnnnnnnnnnnnnnnnnnnnnnnnnnnnnnnnnnnnnnnnnnnnnnnnnnnnnnnnnnnnnnnnnnnnnnnnnnnnnnnnnnnnnnnnnnnnnnnnnnnnnnnnnnnnnnnnnnnnnnnnnnnnnnnnnnnnnnnnnnnnnnnnnnnnnnnnnnnnnnnnnnnnnnnnnnnnnnnnnnnnnnnnnnnnnnnnnnnnnnnnnnnnnnnnnnnnnnnnnnnnnnnnnnnnnnnnnnnnnnnnnnnnnnnnnnnnnnnnnnnnnnnnnnnnnnnnnnnnnnnnnnnnnnnnnnnnnnnnnnnnnnnnnnnnnnnnnnnnnnnnnnnnnnnnnnnnnnnnnnnnnnnnnnnnnnnnnnnnnnnnnnnnnnnnnnnnnnnnnnnnnnnnnnnnnnnnnnnnnnnnnnnnnnnnnnnnnnnnnnnnnnnnnnnnnnnnnnnnnnnnnnnnnnnnnnnnnnnnnnnnnnnnnnnnnnnnnnnnnnnnnnnnnnnnnnnnnnnnnnnnnnnnnnnnnnnnnnnnnnnnnnnnnnnnnnnnnnnnnnnnnnnnnnnnnnnnnnnnnnnnnnnnnnnnnnnnnnnnnnnnnnnnnnnnnnnnnnnnnnnnnnnnnnnnnnnnnnnnnnnnnnnnnnnnnnnnnnnnnnnnnnnnnnnnnnnnnnnnnnnnnnnnnnnnnnnnnnnnnnnnnnnnnnnnnnnnnnnnnnnnnnnnnnnnnnnnnnnnnnnnnnnnnnnnnnnnnnnnnnnnnnnnnnnnnnnnnnnnnnnnnnnnnnnnnnnnnnnnnnnnnnnnnnnnnnnnnnnnnnnnnnnnnnnnnnnnnnnnnnnnnnnnnnnnnnnnnnnnnnnnnnnnnnnnnnnnnnnnnnnnnnnnnnnnnnnnnnnnnnnnnnnnnnnnnnnnnnnnnnnnnnnnnnnnnnnnnnnnnnnnnnnnnnnnnnnnnnnnnnnnnnnnnnnnnnnnnnnnnnnnnnnnnnnnnnnnnnnnnnnnnnnnnnnnnnnnnnnnnnnnnnnnnnnnnnnnnnnnnnnnnnnnnnnnnnnnnnnnnnnnnnnnnnnnnnnnnnnnnnnnnnnnnnnnnnnnnnnnnnnnnnnnnnnnnnnnnnnnnnnnnnnnnnnnnnnnnnnnnnnnnnnnnnnnnnnnnnnnnnnnnnnnnnnnnnnnnnnnnnnnnnnnnnnnnnnnnnnnnnnnnnnnnnnnnnnnnnnnnnnnnnnnnnnnnnnnnnnnnnnnnnnnnnnnnnnnnnnnnnnnnnnnnnnnnnnnnnnnnnnnnnnnnnnnnnnnnnnnnnnnnnnnnnnnnnnnnnnnnnnnnnnnnnnnnnnnnnnnnnnnnnnnnnnnnnnnnnnnnnnnnnnnnnnnnnnnnnnnnnnnnnnnnnnnnnnnnnnnnnnnnnnnnnnnnnnnnnnnnnnnnnnnnnnnnnnnnnnnnnnnnnnnnnnnnnnnnnnnnnnnnnnnnnnnnnnnnnnnnnnnnnnnnnnnnnnnnnnnnnnnnnnnnnnnnnnnnnnnnnnnnnnnnnnnnnnnnnnnnnnnnnnnnnnnnnnnnnnnnnnnnnnnnnnnnnnnnnnnnnnnnnnnnnnnnnnnnnnnnnnnnnnnnnnnnnnnnnnnnnnnnnnnnnnnnnnnnnnnnnnnnnnnnnnnnnnnnnnnnnnnnnnnnnnnnnnnnnnnnnnnnnnnnnnnnnnnnnnnnnnnnnnnnnnnnnnnnnnnnnnnnnnnnnnnnnnnnnnnnnnnnnnnnnnnnnnnnnnnnnnnnnnnnnnnnnnnnnnnnnnnnnnnnnnnnnnnnnnnnnnnnnnnnnnnnnnnnnnnnnnnnnnnnnnnnnnnnnnnnnnnnnnnnnnnnnnnnnnnnnnnnnnnnnnnnnnnnnnnnnnnnnnnnnnnnnnnnnnnnnnnnnnnnnnnnnnnnnnnnnnnnnnnnnnnnnnnnnnnnnnnnnnnnnnnnnnnnnnnnnnnnnnnnnnnnnnnnnnnnnnnnnnnnnnnnnnnnnnnnnnnnnnnnnnnnnnnnnnnnnnnnnnnnnnnnnnnnnnnnnnnnnnnnnnnnnnnnnnnnnnnnnnnnnnnnnnnnnnnnnnnnnnnnnnnnnnnnnnnnnnnnnnnnnnnnnnnnnnnnnnnnnnnnnnnnnnnnnnnnnnnnnnnnnnnnnnnnnnnnnnnnnnnnnnnnnnnnnnnnnnnnnnnnnnnnnnnnnnnnnnnnnnnnnnnnnnnnnnnnnnnnnnnnnnnnnnnnnnnnnnnnnnnnnnnnnnnnnnnnnnnnnnnnnnnnnnnnnnnnnnnnnnnnnnnnnnnnnnnnnnnnnnnnnnnnnnnnnnnnnnnnnnnnnnnnnnnnnnnnnnnnnnnnnnnnnnnnnnnnnnnnnnnnnnnnnnnnnnnnnnnnnnnnnnnnnnnnnnnnnnnnnnnnnnnnnnnnnnnnnnnnnnnnnnnnnnnnnnnnnnnnnnnnnnnnnnnnnnnnnnnnnnnnnnnnnnnnnnnnnnnnnnnnnnnnnnnnnnnnnnnnnnnnnnnnnnnnnnnnnnnnnnnnnnnnnnnnnnnnnnnnnnnnnnnnnnnnnnnnnnnnnnnnnnnnnnnnnnnnnnnnnnnnnnnnnnnnnnnnnnnnnnnnnnnnnnnnnnnnnnnnnnnnnnnnnnnnnnnnnnnnnnnnnnnnnnnnnnnnnnnnnnnnnnnnnnnnnnnnnnnnnnnnnnnnnnnnnnnnnnnnnnnnnnnnnnnnnnnnnnnnnnnnnnnnnnnnnnnnnnnnnnnnnnnnnnnnnnnnnnnnnnnnnnnnnnnnnnnnnnnnnnnnnnnnnnnnnnnnnnnnnnnnnnnnnnnnnnnnnnnnnnnnnnnnnnnnnnnnnnnnnnnnnnnnnnnnnnnnnnnnnnnnnnnnnnnnnnnnnnnnnnnnnnnnnnnnnnnnnnnnnnnnnnnnnnnnnnnnnnnnnnnnnnnnnnnnnnnnnnnnnnnnnnnnnnnnnnnnnnnnnnnnnnnnnnnnnnnnnnnnnnnnnnnnnnnnnnnnnnnnnnnnnnnnnnnnnnnnnnnnnnnnnnnnnnnnnnnnnnnnnnnnnnnnnnnnnnnnnnnnnnnnnnnnnnnnnnnnnnnnnnnnnnnnnnnnnnnnnnnnnnnnnnnnnnnnnnnnnnnnnnnnnnnnnnnnnnnnnnnnnnnnnnnnnnnnnnnnnnnnnnnnnnnnnnnnnnnnnnnnnnnnnnnnnnnnnnnnnnnnnnnnnnnnnnnnnnnnnnnnnnnnnnnnnnnnnnnnnnnnnnnnnnnnnnnnnnnnnnnnnnnnnnnnnnnnnnnnnnnnnnnnnnnnnnnnnnnnnnnnnnnnnnnnnnnnnnnnnnnnnnnnnnnnnnnnnnnnnnnnnnnnnnnnnnnnnnnnnnnnnnnnnnnnnnnnnnnnnnnnnnnnnnnnnnnnnnnnnnnnnnnnnnnnnnnnnnnnnnnnnnnnnnnnnnnnnnnnnnnnnnnnnnnnnnnnnnnnnnnnnnnnnnnnnnnnnnnnnnnnnnnnnnnnnnnnnnnnnnnnnnnnnnnnnnnnnnnnnnnnnnnnnnnnnnnnnnnnnnnnnnnnnnnnnnnnnnnnnnnnnnnnnnnnnnnnnnnnnnnnnnnnnnnnnnnnnnnnnnnnnnnnnnnnnnnnnnnnnnnnnnnnnnnnnnnnnnnnnnnnnnnnnnnnnnnnnnnnnnnnnnnnnnnnnnnnnnnnnnnnnnnnnnnnnnnnnnnnnnnnnnnnnnnnnnnnnnnnnnnnnnnnnnnnnnnnnnnnnnnnnnnnnnnnnnnnnnnnnnnnnnnnnnnnnnnnnnnnnnnnnnnnnnnnnnnnnnnnnnnnnnnnnnnnnnnnnnnnnnnnnnnnnnnnnnnnnnnnnnnnnnnnnnnnnnnnnnnnnnnnnnnnnnnnnnnnnnnnnnnnnnnnnnnnnnnnnnnnnnnnnnnnnnnnnnnnnnnnnnnnnnnnnnnnnnnnnnnnnnnnnnnnnnnnnnnnnnnnnnnnnnnnnnnnnnnnnnnnnnnnnnnnnnnnnnnnnnnnnnnnnnnnnnnnnnnnnnnnnnnnnnnnnnnnnnnnnnnnnnnnnnnnnnnnnnnnnnnnnnnnnnnnnnnnnnnnnnnnnnnnnnnnnnnnnnnnnnnnnnnnnnnnnnnnnnnnnnnnnnnnnnnnnnnnnnnnnnnnnnnnnnnnnnnnnnnnnnnnnnnnnnnnnnnnnnnnnnnnnnnnnnnnnnnnnnnnnnnnnnnnnnnnnnnnnnnnnnnnnnnnnnnnnnnnnnnnnnnnnnnnnnnnnnnnnnnnnnnnnnnnnnnnnnnnnnnnnnnnnnnnnnnnnnnnnnnnnnnnnnnnnnnnnnnnnnnnnnnnnnnnnnnnnnnnnnnnnnnnnnnnnnnnnnnnnnnnnnnnnnnnnnnnnnnnnnnnnnnnnnnnnnnnnnnnnnnnnnnnnnnnnnnnnnnnnnnnnnnnnnnnnnnnnnnnnnnnnnnnnnnnnnnnnnnnnnnnnnnnnnnnnnnnnnnnnnnnnnnnnnnnnnnnnnnnnnnnnnnnnnnnnnnnnnnnnnnnnnnnnnnnnnnnnnnnnnnnnnnnnnnnnnnnnnnnnnnnnnnnnnnnnnnnnnnnnnnnnnnnnnnnnnnnnnnnnnnnnnnnnnnnnnnnnnnnnnnnnnnnnnnnnnnnnnnnnnnnnnnnnnnnnnnnnnnnnnnnnnnnnnnnnnnnnnnnnnnnnnnnnnnnnnnnnnnnnnnnnnnnnnnnnnnnnnnnnnnnnnnnnnnnnnnnnnnnnnnnnnnnnnnnnnnnnnnnnnnnnnnnnnnnnnnnnnnnnnnnnnnnnnnnnnnnnnnnnnnnnnnnnnnnnnnnnnnnnnnnnnnnnnnnnnnnnnnnnnnnnnnnnnnnnnnnnnnnnnnnnnnnnnnnnnnnnnnnnnnnnnnnnnnnnnnnnnnnnnnnnnnnnnnnnnnnnnnnnnnnnnnnnnnnnnnnnnnnnnnnnnnnnnnnnnnnnnnnnnnnnnnnnnnnnnnnnnnnnnnnnnnnnnnnnnnnnnnnnnnnnnnnnnnnnnnnnnnnnnnnnnnnnnnnnnnnnnnnnnnnnnnnnnnnnnnnnnnnnnnnnnnnnnnnnnnnnnnnnnnnnnnnnnnnnnnnnnnnnnnnnnnnnnnnnnnnnnnnnnnnnnnnnnnnnnnnnnnnnnnnnnnnnnnnnnnnnnnnnnnnnnnnnnnnnnnnnnnnnnnnnnnnnnnnnnnnnnnnnnnnnnnnnnnnnnnnnnnnnnnnnnnnnnnnnnnnnnnnnnnnnnnnnnnnnnnnnnnnnnnnnnnnnnnnnnnnnnnnnnnnnnnnnnnnnnnnnnnnnnnnnnnnnnnnnnnnnnnnnnnnnnnnnnnnnnnnnnnnnnnnnnnnnnnnnnnnnnnnnnnnnnnnnnnnnnnnnnnnnnnnnnnnnnnnnnnnnnnnnnnnnnnnnnnnnnnnnnnnnnnnnnnnnnnnnnnnnnnnnnnnnnnnnnnnnnnnnnnnnnnnnnnnnnnnnnnnnnnnnnnnnnnnnnnnnnnnnnnnnnnnnnnnnnnnnnnnnnnnnnnnnnnnnnnnnnnnnnnnnnnnnnnnnnnnnnnnnnnnnnnnnnnnnnnnnnnnnnnnnnnnnnnnnnnnnnnnnnnnnnnnnnnnnnnnnnnnnnnnnnnnnnnnnnnnnnnnnnnnnnnnnnnnnnnnnnnnnnnnnnnnnnnnnnnnnnnnnnnnnnnnnnnnnnnnnnnnnnnnnnnnnnnnnnnnnnnnnnnnnnnnnnnnnnnnnnnnnnnnnnnnnnnnnnnnnnnnnnnnnnnnnnnnnnnnnnnnnnnnnnnnnnnnnnnnnnnnnnnnnnnnnnnnnnnnnnnnnnnnnnnnnnnnnnnnnnnnnnnnnnnnnnnnnnnnnnnnnnnnnnnnnnnnnnnnnnnnnnnnnnnnnnnnnnnnnnnnnnnnnnnnnnnnnnnnnnnnnnnnnnnnnnnnnnnnnnnnnnnnnnnnnnnnnnnnnnnnnnnnnnnnnnnnnnnnnnnnnnnnnnnnnnnnnnnnnnnnnnnnnnnnnnnnnnnnnnnnnnnnnnnnnnnnnnnnnnnnnnnnnnnnnnnnnnnnnnnnnnnnnnnnnnnnnnnnnnnnnnnnnnnnnnnnnnnnnnnnnnnnnnnnnnnnnnnnnnnnnnnnnnnnnnnnnnnnnnnnnnnnnnnnnnnnnnnnnnnnnnnnnnnnnnnnnnnnnnnnnnnnnnnnnnnnnnnnnnnnnnnnnnnnnnnnnnnnnnnnnnnnnnnnnnnnnnnnnnnnnnnnnnnnnnnnnnnnnnnnnnnnnnnnnnnnnnnnnnnnnnnnnnnnnnnnnnnnnnnnnnnnnnnnnnnnnnnnnnnnnnnnnnnnnnnnnnnnnnnnnnnnnnnnnnnnnnnnnnnnnnnnnnnnnnnnnnnnnnnnnnnnnnnnnnnnnnnnnnnnnnnnnnnnnnnnnnnnnnnnnnnnnnnnnnnnnnnnnnnnnnnnnnnnnnnnnnnnnnnnnnnnnnnnnnnnnnnnnnnnnnnnnnnnnnnnnnnnnnnnnnnnnnnnnnnnnnnnnnnnnnnnnnnnnnnnnnnnnnnnnnnnnnnnnnnnnnnnnnnnnnnnnnnnnnnnnnnnnnnnnnnnnnnnnnnnnnnnnnnnnnnnnnnnnnnnnnnnnnnnnnnnnnnnnnnnnnnnnnnnnnnnnnnnnnnnnnnnnnnnnnnnnnnnnnnnnnnnnnnnnnnnnnnnnnnnnnnnnnnnnnnnnnnnnnnnnnnnnnnnnnnnnnnnnnnnnnnnnnnnnnnnnnnnnnnnnnnnnnnnnnnnnnnnnnnnnnnnnnnnnnnnnnnnnnnnnnnnnnnnnnnnnnnnnnnnnnnnnnnnnnnnnnnnnnnnnnnnnnnnnnnnnnnnnnnnnnnnnnnnnnnnnnnnnnnnnnnnnnnnnnnnnnnnnnnnnnnnnnnnnnnnnnnnnnnnnnnnnnnnnnnnnnnnnnnnnnnnnnnnnnnnnnnnnnnnnnnnnnnnnnnnnnnnnnnnnnnnnnnnnnnnnnnnnnnnnnnnnnnnnnnnnnnnnnnnnnnnnnnnnnnnnnnnnnnnnnnnnnnnnnnnnnnnnnnnnnnnnnnnnnnnnnnnnnnnnnnnnnnnnnnnnnnnnnnnnnnnnnnnnnnnnnnnnnnnnnnnnnnnnnnnnnnnnnnnnnnnnnnnnnnnnnnnnnnnnnnnnnnnnnnnnnnnnnnnnnnnnnnnnnnnnnnnnnnnnnnnnnnnnnnnnnnnnnnnnnnnnnnnnnnnnnnnnnnnnnnnnnnnnnnnnnnnnnnnnnnnnnnnnnnnnnnnnnnnnnnnnnnnnnnnnnnnnnnnnnnnnnnnnnnnnnnnnnnnnnnnnnnnnnnnnnnnnnnnnnnnnnnnnnnnnnnnnnnnnnnnnnnnnnnnnnnnnnnnnnnnnnnnnnnnnnnnnnnnnnnnnnnnnnnnnnnnnnnnnnnnnnnnnnnnnnnnnnnnnnnnnnnnnnnnnnnnnnnnnnnnnnnnnnnnnnnnnnnnnnnnnnnnnnnnnnnnnnnnnnnnnnnnnnnnnnnnnnnnnnnnnnnnnnnnnnnnnnnnnnnnnnnnnnnnnnnnnnnnnnnnnnnnnnnnnnnnnnnnnnnnnnnnnnnnnnnnnnnnnnnnnnnnnnnnnnnnnnnnnnnnnnnnnnnnnnnnnnnnnnnnnnnnnnnnnnnnnnnnnnnnnnnnnnnnnnnnnnnnnnnnnnnnnnnnnnnnnnnnnnnnnnnnnnnnnnnnnnnnnnnnnnnnnnnnnnnnnnnnnnnnnnnnnnnnnnnnnnnnnnnnnnnnnnnnnnnnnnnnnnnnnnnnnnnnnnnnnnnnnnnnnnnnnnnnnnnnnnnnnnnnnnnnnnnnnnnnnnnnnnnnnnnnnnnnnnnnnnnnnnnnnnnnnnnnnnnnnnnnnnnnnnnnnnnnnnnnnnnnnnnnnnnnnnnnnnnnnnnnnnnnnnnnnnnnnnnnnnnnnnnnnnnnnnnnnnnnnnnnnnnnnnnnnnnnnnnnnnnnnnnnnnnnnnnnnnnnnnnnnnnnnnnnnnnnnnnnnnnnnnnnnnnnnnnnnnnnnnnnnnnnnnnnnnnnnnnnnnnnnnnnnnnnnnnnnnnnnnnnnnnnnnnnnnnnnnnnnnnnnnnnnnnnnnnnnnnnnnnnnnnnnnnnnnnnnnnnnnnnnnnnnnnnnnnnnnnnnnnnnnnnnnnnnnnnnnnnnnnnnnnnnnnnnnnnnnnnnnnnnnnnnnnnnnnnnnnnnnnnnnnnnnnnnnnnnnnnnnnnnnnnnnnnnnnnnnnnnnnnnnnnnnnnnnnnnnnnnnnnnnnnnnnnnnnnnnnnnnnnnnnnnnnnnnnnnnnnnnnnnnnnnnnnnnnnnnnnnnnnnnnnnnnnnnnnnnnnnnnnnnnnnnnnnnnnnnnnnnnnnnnnnnnnnnnnnnnnnnnnnnnnnnnnnnnnnnnnnnnnnnnnnnnnnnnnnnnnnnnnnnnnnnnnnnnnnnnnnnnnnnnnnnnnnnnnnnnnnnnnnnnnnnnnnnnnnnnnnnnnnnnnnnnnnnnnnnnnnnnnnnnnnnnnnnnnnnnnnnnnnnnnnnnnnnnnnnnnnnnnnnnnnnnnnnnnnnnnnnnnnnnnnnnnnnnnnnnnnnnnnnnnnnnnnnnnnnnnnnnnnnnnnnnnnnnnnnnnnnnnnnnnnnnnnnnnnnnnnnnnnnnnnnnnnnnnnnnnnnnnnnnnnnnnnnnnnnnnnnnnnnnnnnnnnnnnnnnnnnnnnnnnnnnnnnnnnnnnnnnnnnnnnnnnnnnnnnnnnnnnnnnnnnnnnnnnnnnnnnnnnnnnnnnnnnnnnnnnnnnnnnnnnnnnnnnnnnnnnnnnnnnnnnnnnnnnnnnnnnnnnnnnnnnnnnnnnnnnnnnnnnnnnnnnnnnnnnnnnnnnnnnnnnnnnnnnnnnnnnnnnnnnnnnnnnnnnnnnnnnnnnnnnnnnnnnnnnnnnnnnnnnnnnnnnnnnnnnnnnnnnnnnnnnnnnnnnnnnnnnnnnnnnnnnnnnnnnnnnnnnnnnnnnnnnnnnnnnnnnnnnnnnnnnnnnnnnnnnnnnnnnnnnnnnnnnnnnnnnnnnnnnnnnnnnnnnnnnnnnnnnnnnnnnnnnnnnnnnnnnnnnnnnnnnnnnnnnnnnnnnnnnnnnnnnnnnnnnnnnnnnnnnnnnnnnnnnnnnnnnnnnnnnnnnnnnnnnnnnnnnnnnnnnnnnnnnnnnnnnnnnnnnnnnnnnnnnnnnnnnnnnnnnnnnnnnnnnnnnnnnnnnnnnnnnnnnnnnnnnnnnnnnnnnnnnnnnnnnnnnnnnnnnnnnnnnnnnnnnnnnnnnnnnnnnnnnnnnnnnnnnnnnnnnnnnnnnnnnnnnnnnnnnnnnnnnnnnnnnnnnnnnnnnnnnnnnnnnnnnnnnnnnnnnnnnnnnnnnnnnnnnnnnnnnnnnnnnnnnnnnnnnnnnnnnnnnnnnnnnnnnnnnnnnnnnnnnnnnnnnnnnnnnnnnnnnnnnnnnnnnnnnnnnnnnnnnnnnnnnnnnnnnnnnnnnnnnnnnnnnnnnnnnnnnnnnnnnnnnnnnnnnnnnnnnnnnnnnnnnnnnnnnnnnnnnnnnnnnnnnnnnnnnnnnnnnnnnnnnnnnnnnnnnnnnnnnnnnnnnnnnnnnnnnnnnnnnnnnnnnnnnnnnnnnnnnnnnnnnnnnnnnnnnnnnnnnnnnnnnnnnnnnnnnnnnnnnnnnnnnnnnnnnnnnnnnnnnnnnnnnnnnnnnnnnnnnnnnnnnnnnnnnnnnnnnnnnnnnnnnnnnnnnnnnnnnnnnnnnnnnnnnnnnnnnnnnnnnnnnnnnnnnnnnnnnnnnnnnnnnnnnnnnnnnnnnnnnnnnnnnnnnnnnnnnnnnnnnnnnnnnnnnnnnnnnnnnnnnnnnnnnnnnnnnnnnnnnnnnnnnnnnnnnnnnnnnnnnnnnnnnnnnnnnnnnnnnnnnnnnnnnnnnnnnnnnnnnnnnnnnnnnnnnnnnnnnnnnnnnnnnnnnnnnnnnnnnnnnnnnnnnnnnnnnnnnnnnnnnnnnnnnnnnnnnnnnnnnnnnnnnnnnnnnnnnnnnnnnnnnnnnnnnnnnnnnnnnnnnnnnnnnnnnnnnnnnnnnnnnnnnnnnnnnnnnnnnnnnnnnnnnnnnnnnnnnnnnnnnnnnnnnnnnnnnnnnnnnnnnnnnnnnnnnnnnnnnnnnnnnnnnnnnnnnnnnnnnnnnnnnnnnnnnnnnnnnnnnnnnnnnnnnnnnnnnnnnnnnnnnnnnnnnnnnnnnnnnnnnnnnnnnnnnnnnnnnnnnnnnnnnnnnnnnnnnnnnnnnnnnnnnnnnnnnnnnnnnnnnnnnnnnnnnnnnnnnnnnnnnnnnnnnnnnnnnnnnnnnnnnnnnnnnnnnnnnnnnnnnnnnnnnnnnnnnnnnnnnnnnnnnnnnnnnnnnnnnnnnnnnnnnnnnnnnnnnnnnnnnnnnnnnnnnnnnnnnnnnnnnnnnnnnnnnnnnnnnnnnnnnnnnnnnnnnnnnnnnnnnnnnnnnnnnnnnnnnnnnnnnnnnnnnnnnnnnnnnnnnnnnnnnnnnnnnnnnnnnnnnnnnnnnnnnnnnnnnnnnnnnnnnnnnnnnnnnnnnnnnnnnnnnnnnnnnnnnnnnnnnnnnnnnnnnnnnnnnnnnnnnnnnnnnnnnnnnnnnnnnnnnnnnnnnnnnnnnnnnnnnnnnnnnnnnnnnnnnnnnnnnnnnnnnnnnnnnnnnnnnnnnnnnnnnnnnnnnnnnnnnnnnnnnnnnnnnnnnnnnnnnnnnnnnnnnnnnnnnnnnnnnnnnnnnnnnnnnnnnnnnnnnnnnnnnnnnnnnnnnnnnnnnnnnnnnnnnnnnnnnnnnnnnnnnnnnnnnnnnnnnnnnnnnnnnnnnnnnnnnnnnnnnnnnnnnnnnnnnnnnnnnnnnnnnnnnnnnnnnnnnnnnnnnnnnnnnnnnnnnnnnnnnnnnnnnnnnnnnnnnnnnnnnnnnnnnnnnnnnnnnnnnnnnnnnnnnnnnnnnnnnnnnnnnnnnnnnnnnnnnnnnnnnnnnnnnnnnnnnnnnnnnnnnnnnnnnnnnnnnnnnnnnnnnnnnnnnnnnnnnnnnnnnnnnnnnnnnnnnnnnnnnnnnnnnnnnnnnnnnnnnnnnnnnnnnnnnnnnnnnnnnnnnnnnnnnnnnnnnnnnnnnnnnnnnnnnnnnnnnnnnnnnnnnnnnnnnnnnnnnnnnnnnnnnnnnnnnnnnnnnnnnnnnnnnnnnnnnnnnnnnnnnnnnnnnnnnnnnnnnnnnnnnnnnnnnnnnnnnnnnnnnnnnnnnnnnnnnnnnnnnnnnnnnnnnnnnnnnnnnnnnnnnnnnnnnnnnnnnnnnnnnnnnnnnnnnnnnnnnnnnnnnnnnnnnnnnnnnnnnnnnnnnnnnnnnnnnnnnnnnnnnnnnnnnnnnnnnnnnnnnnnnnnnnnnnnnnnnnnnnnnnnnnnnnnnnnnnnnnnnnnnnnnnnnnnnnnnnnnnnnnnnnnnnnnnnnnnnnnnnnnnnnnnnnnnnnnnnnnnnnnnnnnnnnnnnnnnnnnnnnnnnnnnnnnnnnnnnnnnnnnnnnnnnnnnnnnnnnnnnnnnnnnnnnnnnnnnnnnnnnnnnnnnnnnnnnnnnnnnnnnnnnnnnnnnnnnnnnnnnnnnnnnnnnnnnnnnnnnnnnnnnnnnnnnnnnnnnnnnnnnnnnnnnnnnnnnnnnnnnnnnnnnnnnnnnnnnnnnnnnnnnnnnnnnnnnnnnnnnnnnnnnnnnnnnnnnnnnnnnnnnnnnnnnnnnnnnnnnnnnnnnnnnnnnnnnnnnnnnnnnnnnnnnnnnnnnnnnnnnnnnnnnnnnnnnnnnnnnnnnnnnnnnnnnnnnnnnnnnnnnnnnnnnnnnnnnnnnnnnnnnnnnnnnnnnnnnnnnnnnnnnnnnnnnnnnnnnnnnnnnnnnnnnnnnnnnnnnnnnnnnnnnnnnnnnnnnnnnnnnnnnnnnnnnnnnnnnnnnnnnnnnnnnnnnnnnnnnnnnnnnnnnnnnnnnnnnnnnnnnnnnnnnnnnnnnnnnnnnnnnnnnnnnnnnnnnnnnnnnnnnnnnnnnnnnnnnnnnnnnnnnnnnnnnnnnnnnnnnnnnnnnnnnnnnnnnnnnnnnnnnnnnnnnnnnnnnnnnnnnnnnnnnnnnnnnnnnnnnnnnnnnnnnnnnnnnnnnnnnnnnnnnnnnnnnnnnnnnnnnnnnnnnnnnnnnnnnnnnnnnnnnnnnnnnnnnnnnnnnnnnnnnnnnnnnnnnnnnnnnnnnnnnnnnnnnnnnnnnnnnnnnnnnnnnnnnnnnnnnnnnnnnnnnnnnnnnnnnnnnnnnnnnnnnnnnnnnnnnnnnnnnnnnnnnnnnnnnnnnnnnnnnnnnnnnnnnnnnnnnnnnnnnnnnnnnnnnnnnnnnnnnnnnnnnnnnnnnnnnnnnnnnnnnnnnnnnnnnnnnnnnnnnnnnnnnnnnnnnnnnnnnnnnnnnnnnnnnnnnnnnnnnnnnnnnnnnnnnnnnnnnnnnnnnnnnnnnnnnnnnnnnnnnnnnnnnnnnnnnnnnnnnnnnnnnnnnnnnnnnnnnnnnnnnnnnnnnnnnnnnnnnnnnnnnnnnnnnnnnnnnnnnnnnnnnnnnnnnnnnnnnnnnnnnnnnnnnnnnnnnnnnnnnnnnnnnnnnnnnnnnnnnnnnnnnnnnnnnnnnnnnnnnnnnnnnnnnnnnnnnnnnnnnnnnnnnnnnnnnnnnnnnnnnnnnnnnnnnnnnnnnnnnnnnnnnnnnnnnnnnnnnnnnnnnnnnnnnnnnnnnnnnnnnnnnnnnnnnnnnnnnnnnnnnnnnnnnnnnnnnnnnnnnnnnnnnnnnnnnnnnnnnnnnnnnnnnnnnnnnnnnnnnnnnnnnnnnnnnnnnnnnnnnnnnnnnnnnnnnnnnnnnnnnnnnnnnnnnnnnnnnnnnnnnnnnnnnnnnnnnnnnnnnnnnnnnnnnnnnnnnnnnnnnnnnnnnnnnnnnnnnnnnnnnnnnnnnnnnnnnnnnnnnnnnnnnnnnnnnnnnnnnnnnnnnnnnnnnnnnnnnnnnnnnnnnnnnnnnnnnnnnnnnnnnnnnnnnnnnnnnnnnnnnnnnnnnnnnnnnnnnnnnnnnnnnnnnnnnnnnnnnnnnnnnnnnnnnnnnnnnnnnnnnnnnnnnnnnnnnnnnnnnnnnnnnnnnnnnnnnnnnnnnnnnnnnnnnnnnnnnnnnnnnnnnnnnnnnnnnnnnnnnnnnnnnnnnnnnnnnnnnnnnnnnnnnnnnnnnnnnnnnnnnnnnnnnnnnnnnnnnnnnnnnnnnnnnnnnnnnnnnnnnnnnnnnnnnnnnnnnnnnnnnnnnnnnnnnnnnnnnnnnnnnnnnnnnnnnnnnnnnnnnnnnnnnnnnnnnnnnnnnnnnnnnnnnnnnnnnnnnnnnnnnnnnnnnnnnnnnnnnnnnnnnnnnnnnnnnnnnnnnnnnnnnnnnnnnnnnnnnnnnnnnnnnnnnnnnnnnnnnnnnnnnnnnnnnnnnnnnnnnnnnnnnnnnnnnnnnnnnnnnnnnnnnnnnnnnnnnnnnnnnnnnnnnnnnnnnnnnnnnnnnnnnnnnnnnnnnnnnnnnnnnnnnnnnnnnnnnnnnnnnnnnnnnnnnnnnnnnnnnnnnnnnnnnnnnnnnnnnnnnnnnnnnnnnnnnnnnnnnnnnnnnnnnnnnnnnnnnnnnnnnnnnnnnnnnnnnnnnnnnnnnnnnnnnnnnnnnnnnnnnnnnnnnnnnnnnnnnnnnnnnnnnnnnnnnnnnnnnnnnnnnnnnnnnnnnnnnnnnnnnnnnnnnnnnnnnnnnnnnnnnnnnnnnnnnnnnnnnnnnnnnnnnnnnnnnnnnnnnnnnnnnnnnnnnnnnnnnnnnnnnnnnnnnnnnnnnnnnnnnnnnnnnnnnnnnnnnnnnnnnnnnnnnnnnnnnnnnnnnnnnnnnnnnnnnnnnnnnnnnnnnnnnnnnnnnnnnnnnnnnnnnnnnnnnnnnnnnnnnnnnnnnnnnnnnnnnnnnnnnnnnnnnnnnnnnnnnnnnnnnnnnnnnnnnnnnnnnnnnnnnnnnnnnnnnnnnnnnnnnnnnnnnnnnnnnnnnnnnnnnnnnnnnnnnnnnnnnnnnnnnnnnnnnnnnnnnnnnnnnnnnnnnnnnnnnnnnnnnnnnnnnnnnnnnnnnnnnnnnnnnnnnnnnnnnnnnnnnnnnnnnnnnnnnnnnnnnnnnnnnnnnnnnnnnnnnnnnnnnnnnnnnnnnnnnnnnnnnnnnnnnnnnnnnnnnnnnnnnnnnnnnnnnnnnnnnnnnnnnnnnnnnnnnnnnnnnnnnnnnnnnnnnnnnnnnnnnnnnnnnnnnnnnnnnnnnnnnnnnnnnnnnnnnnnnnnnnnnnnnnnnnnnnnnnnnnnnnnnnnnnnnnnnnnnnnnnnnnnnnnnnnnnnnnnnnnnnnnnnnnnnnnnnnnnnnnnnnnnnnnnnnnnnnnnnnnnnnnnnnnnnnnnnnnnnnnnnnnnnnnnnnnnnnnnnnnnnnnnnnnnnnnnnnnnnnnnnnnnnnnnnnnnnnnnnnnnnnnnnnnnnnnnnnnnnnnnnnnnnnnnnnnnnnnnnnnnnnnnnnnnnnnnnnnnnnnnnnnnnnnnnnnnnnnnnnnnnnnnnnnnnnnnnnnnnnnnnnnnnnnnnnnnnnnnnnnnnnnnnnnnnnnnnnnnnnnnnnnnnnnnnnnnnnnnnnnnnnnnnnnnnnnnnnnnnnnnnnnnnnnnnnnnnnnnnnnnnnnnnnnnnnnnnnnnnnnnnnnnnnnnnnnnnnnnnnnnnnnnnnnnnnnnnnnnnnnnnnnnnnnnnnnnnnnnnnnnnnnnnnnnnnnnnnnnnnnnnnnnnnnnnnnnnnnnnnnnnnnnnnnnnnnnnnnnnnnnnnnnnnnnnnnnnnnnnnnnnnnnnnnnnnnnnnnnnnnnnnnnnnnnnnnnnnnnnnnnnnnnnnnnnnnnnnnnnnnnnnnnnnnnnnnnnnnnnnnnnnnnnnnnnnnnnnnnnnnnnnnnnnnnnnnnnnnnnnnnnnnnnnnnnnnnnnnnnnnnnnnnnnnnnnnnnnnnnnnnnnnnnnnnnnnnnnnnnnnnnnnnnnnnnnnnnnnnnnnnnnnnnnnnnnnnnnnnnnnnnnnnnnnnnnnnnnnnnnnnnnnnnnnnnnnnnnnnnnnnnnnnnnnnnnnnnnnnnnnnnnnnnnnnnnnnnnnnnnnnnnnnnnnnnnnnnnnnnnnnnnnnnnnnnnnnnnnnnnnnnnnnnnnnnnnnnnnnnnnnnnnnnnnnnnnnnnnnnnnnnnnnnnnnnnnnnnnnnnnnnnnnnnnnnnnnnnnnnnnnnnnnnnnnnnnnnnnnnnnnnnnnnnnnnnnnnnnnnnnnnnnnnnnnnnnnnnnnnnnnnnnnnnnnnnnnnnnnnnnnnnnnnnnnnnnnnnnnnnnnnnnnnnnnnnnnnnnnnnnnnnnnnnnnnnnnnnnnnnnnnnnnnnnnnnnnnnnnnnnnnnnnnnnnnnnnnnnnnnnnnnnnnnnnnnnnnnnnnnnnnnnnnnnnnnnnnnnnnnnnnnnnnnnnnnnnnnnnnnnnnnnnnnnnnnnnnnnnnnnnnnnnnnnnnnnnnnnnnnnnnnnnnnnnnnnnnnnnnnnnnnnnnnnnnnnnnnnnnnnnnnnnnnnnnnnnnnnnnnnnnnnnnnnnnnnnnnnnnnnnnnnnnnnnnnnnnnnnnnnnnnnnnnnnnnnnnnnnnnnnnnnnnnnnnnnnnnnnnnnnnnnnnnnnnnnnnnnnnnnnnnnnnnnnnnnnnnnnnnnnnnnnnnnnnnnnnnnnnnnnnnnnnnnnnnnnnnnnnnnnnnnnnnnnnnnnnnnnnnnnnnnnnnnnnnnnnnnnnnnnnnnnnnnnnnnnnnnnnnnnnnnnnnnnnnnnnnnnnnnnnnnnnnnnnnnnnnnnnnnnnnnnnnnnnnnnnnnnnnnnnnnnnnnnnnnnnnnnnnnnnnnnnnnnnnnnnnnnnnnnnnnnnnnnnnnnnnnnnnnnnnnnnnnnnnnnnnnnnnnnnnnnnnnnnnnnnnnnnnnnnnnnnnnnnnnnnnnnnnnnnnnnnnnnnnnnnnnnnnnnnnnnnnnnnnnnnnnnnnnnnnnnnnnnnnnnnnnnnnnnnnnnnnnnnnnnnnnnnnnnnnnnnnnnnnnnnnnnnnnnnnnnnnnnnnnnnnnnnnnnnnnnnnnnnnnnnnnnnnnnnnnnnnnnnnnnnnnnnnnnnnnnnnnnnnnnnnnnnnnnnnnnnnnnnnnnnnnnnnnnnnnnnnnnnnnnnnnnnnnnnnnnnnnnnnnnnnnnnnnnnnnnnnnnnnnnnnnnnnnnnnnnnnnnnnnnnnnnnnnnnnnnnnnnnnnnnnnnnnnnnnnnnnnnnnnnnnnnnnnnnnnnnnnnnnnnnnnnnnnnnnnnnnnnnnnnnnnnnnnnnnnnnnnnnnnnnnnnnnnnnnnnnnnnnnnnnnnnnnnnnnnnnnnnnnnnnnnnnnnnnnnnnnnnnnnnnnnnnnnnnnnnnnnnnnnnnnnnnnnnnnnnnnnnnnnnnnnnnnnnnnnnnnnnnnnnnnnnnnnnnnnnnnnnnnnnnnnnnnnnnnnnnnnnnnnnnnnnnnnnnnnnnnnnnnnnnnnnnnnnnnnnnnnnnnnnnnnnnnnnnnnnnnnnnnnnnnnnnnnnnnnnnnnnnnnnnnnnnnnnnnnnnnnnnnnnnnnnnnnnnnnnnnnnnnnnnnnnnnnnnnnnnnnnnnnnnnnnnnnnnnnnnnnnnnnnnnnnnnnnnnnnnnnnnnnnnnnnnnnnnnnnnnnnnnnnnnnnnnnnnnnnnnnnnnnnnnnnnnnnnnnnnnnnnnnnnnnnnnnnnnnnnnnnnnnnnnnnnnnnnnnnnnnnnnnnnnnnnnnnnnnnnnnnnnnnnnnnnnnnnnnnnnnnnnnnnnnnnnnnnnnnnnnnnnnnnnnnnnnnnnnnnnnnnnnnnnnnnnnnnnnnnnnnnnnnnnnnnnnnnnnnnnnnnnnnnnnnnnnnnnnnnnnnnnnnnnnnnnnnnnnnnnnnnnnnnnnnnnnnnnnnnnnnnnnnnnnnnnnnnnnnnnnnnnnnnnnnnnnnnnnnnnnnnnnnnnnnnnnnnnnnnnnnnnnnnnnnnnnnnnnnnnnnnnnnnnnnnnnnnnnnnnnnnnnnnnnnnnnnnnnnnnnnnnnnnnnnnnnnnnnnnnnnnnnnnnnnnnnnnnnnnnnnnnnnnnnnnnnnnnnnnnnnnnnnnnnnnnnnnnnnnnnnnnnnnnnnnnnnnnnnnnnnnnnnnnnnnnnnnnnnnnnnnnnnnnnnnnnnnnnnnnnnnnnnnnnnnnnnnnnnnnnnnnnnnnnnnnnnnnnnnnnnnnnnnnnnnnnnnnnnnnnnnnnnnnnnnnnnnnnnnnnnnnnnnnnnnnnnnnnnnnnnnnnnnnnnnnnnnnnnnnnnnnnnnnnnnnnnnnnnnnnnnnnnnnnnnnnnnnnnnnnnnnnnnnnnnnnnnnnnnnnnnnnnnnnnnnnnnnnnnnnnnnnnnnnnnnnnnnnnnnnnnnnnnnnnnnnnnnnnnnnnnnnnnnnnnnnnnnnnnnnnnnnnnnnnnnnnnnnnnnnnnnnnnnnnnnnnnnnnnnnnnnnnnnnnnnnnnnnnnnnnnnnnnnnnnnnnnnnnnnnnnnnnnnnnnnnnnnnnnnnnnnnnnnnnnnnnnnnnnnnnnnnnnnnnnnnnnnnnnnnnnnnnnnnnnnnnnnnnnnnnnnnnnnnnnnnnnnnnnnnnnnnnnnnnnnnnnnnnnnnnnnnnnnnnnnnnnnnnnnnnnnnnnnnnnnnnnnnnnnnnnnnnnnnnnnnnnnnnnnnnnnnnnnnnnnnnnnnnnnnnnnnnnnnnnnnnnnnnnnnnnnnnnnnnnnnnnnnnnnnnnnnnnnnnnnnnnnnnnnnnnnnnnnnnnnnnnnnnnnnnnnnnnnnnnnnnnnnnnnnnnnnnnnnnnnnnnnnnnnnnnnnnnnnnnnnnnnnnnnnnnnnnnnnnnnnnnnnnnnnnnnnnnnnnnnnnnnnnnnnnnnnnnnnnnnnnnnnnnnnnnnnnnnnnnnnnnnnnnnnnnnnnnnnnnnnnnnnnnnnnnnnnnnnnnnnnnnnnnnnnnnnnnnnnnnnnnnnnnnnnnnnnnnnnnnnnnnnnnnnnnnnnnnnnnnnnnnnnnnnnnnnnnnnnnnnnnnnnnnnnnnnnnnnnnnnnnnnnnnnnnnnnnnnnnnnnnnnnnnnnnnnnnnnnnnnnnnnnnnnnnnnnnnnnnnnnnnnnnnnnnnnnnnnnnnnnnnnnnnnnnnnnnnnnnnnnnnnnnnnnnnnnnnnnnnnnnnnnnnnnnnnnnnnnnnnnnnnnnnnnnnnnnnnnnnnnnnnnnnnnnnnnnnnnnnnnnnnnnnnnnnnnnnnnnnnnnnnnnnnnnnnnnnnnnnnnnnnnnnnnnnnnnnnnnnnnnnnnnnnnnnnnnnnnnnnnnnnnnnnnnnnnnnnnnnnnnnnnnnnnnnnnnnnnnnnnnnnnnnnnnnnnnnnnnnnnnnnnnnnnnnnnnnnnnnnnnnnnnnnnnnnnnnnnnnnnnnnnnnnnnnnnnnnnnnnnnnnnnnnnnnnnnnnnnnnnnnnnnnnnnnnnnnnnnnnnnnnnnnnnnnnnnnnnnnnnnnnnnnnnnnnnnnnnnnnnnnnnnnnnnnnnnnnnnnnnnnnnnnnnnnnnnnnnnnnnnnnnnnnnnnnnnnnnnnnnnnnnnnnnnnnnnnnnnnnnnnnnnnnnnnnnnnnnnnnnnnnnnnnnnnnnnnnnnnnnnnnnnnnnnnnnnnnnnnnnnnnnnnnnnnnnnnnnnnnnnnnnnnnnnnnnnnnnnnnnnnnnnnnnnnnnnnnnnnnnnnnnnnnnnnnnnnnnnnnnnnnnnnnnnnnnnnnnnnnnnnnnnnnnnnnnnnnnnnnnnnnnnnnnnnnnnnnnnnnnnnnnnnnnnnnnnnnnnnnnnnnnnnnnnnnnnnnnnnnnnnnnnnnnnnnnnnnnnnnnnnnnnnnnnnnnnnnnnnnnnnnnnnnnnnnnnnnnnnnnnnnnnnnnnnnnnnnnnnnnnnnnnnnnnnnnnnnnnnnnnnnnnnnnnnnnnnnnnnnnnnnnnnnnnnnnnnnnnnnnnnnnnnnnnnnnnnnnnnnnnnnnnnnnnnnnnnnnnnnnnnnnnnnnnnnnnnnnnnnnnnnnnnnnnnnnnnnnnnnnnnnnnnnnnnnnnnnnnnnnnnnnnnnnnnnnnnnnnnnnnnnnnnnnnnnnnnnnnnnnnnnnnnnnnnnnnnnnnnnnnnnnnnnnnnnnnnnnnnnnnnnnnnnnnnnnnnnnnnnnnnnnnnnnnnnnnnnnnnnnnnnnnnnnnnnnnnnnnnnnnnnnnnnnnnnnnnnnnnnnnnnnnnnnnnnnnnnnnnnnnnnnnnnnnnnnnnnnnnnnnnnnnnnnnnnnnnnnnnnnnnnnnnnnnnnnnnnnnnnnnnnnnnnnnnnnnnnnnnnnnnnnnnnnnnnnnnnnnnnnnnnnnnnnnnnnnnnnnnnnnnnnnnnnnnnnnnnnnnnnnnnnnnnnnnnnnnnnnnnnnnnnnnnnnnnnnnnnnnnnnnnnnnnnnnnnnnnnnnnnnnnnnnnnnnnnnnnnnnnnnnnnnnnnnnnnnnnnnnnnnnnnnnnnnnnnnnnnnnnnnnnnnnnnnnnnnnnnnnnnnnnnnnnnnnnnnnnnnnnnnnnnnnnnnnnnnnnnnnnnnnnnnnnnnnnnnnnnnnnnnnnnnnnnnnnnnnnnnnnnnnnnnnnnnnnnnnnnnnnnnnnnnnnnnnnnnnnnnnnnnnnnnnnnnnnnnnnnnnnnnnnnnnnnnnnnnnnnnnnnnnnnnnnnnnnnnnnnnnnnnnnnnnnnnnnnnnnnnnnnnnnnnnnnnnnnnnnnnnnnnnnnnnnnnnnnnnnnnnnnnnnnnnnnnnnnnnnnnnnnnnnnnnnnnnnnnnnnnnnnnnnnnnnnnnnnnnnnnnnnnnnnnnnnnnnnnnnnnnnnnnnnnnnnnnnnnnnnnnnnnnnnnnnnnnnnnnnnnnnnnnnnnnnnnnnnnnnnnnnnnnnnnnnnnnnnnnnnnnnnnnnnnnnnnnnnnnnnnnnnnnnnnnnnnnnnnnnnnnnnnnnnnnnnnnnnnnnnnnnnnnnnnnnnnnnnnnnnnnnnnnnnnnnnnnnnnnnnnnnnnnnnnnnnnnnnnnnnnnnnnnnnnnnnnnnnnnnnnnnnnnnnnnnnnnnnnnnnnnnnnnnnnnnnnnnnnnnnnnnnnnnnnnnnnnnnnnnnnnnnnnnnnnnnnnnnnnnnnnnnnnnnnnnnnnnnnnnnnnnnnnnnnnnnnnnnnnnnnnnnnnnnnnnnnnnnnnnnnnnnnnnnnnnnnnnnnnnnnnnnnnnnnnnnnnnnnnnnnnnnnnnnnnnnnnnnnnnnnnnnnnnnnnnnnnnnnnnnnnnnnnnnnnnnnnnnnnnnnnnnnnnnnnnnnnnnnnnnnnnnnnnnnnnnnnnnnnnnnnnnnnnnnnnnnnnnnnnnnnnnnnnnnnnnnnnnnnnnnnnnnnnnnnnnnnnnnnnnnnnnnnnnnnnnnnnnnnnnnnnnnnnnnnnnnnnnnnnnnnnnnnnnnnnnnnnnnnnnnnnnnnnnnnnnnnnnnnnnnnnnnnnnnnnnnnnnnnnnnnnnnnnnnnnnnnnnnnnnnnnnnnnnnnnnnnnnnnnnnnnnnnnnnnnnnnnnnnnnnnnnnnnnnnnnnnnnnnnnnnnnnnnnnnnnnnnnnnnnnnnnnnnnnnnnnnnnnnnnnnnnnnnnnnnnnnnnnnnnnnnnnnnnnnnnnnnnnnnnnnnnnnnnnnnnnnnnnnnnnnnnnnnnnnnnnnnnnnnnnnnnnnnnnnnnnnnnnnnnnnnnnnnnnnnnnnnnnnnnnnnnnnnnnnnnnnnnnnnnnnnnnnnnnnnnnnnnnnnnnnnnnnnnnnnnnnnnnnnnnnnnnnnnnnnnnnnnnnnnnnnnnnnnnnnnnnnnnnnnnnnnnnnnnnnnnnnnnnnnnnnnnnnnnnnnnnnnnnnnnnnnnnnnnnnnnnnnnnnnnnnnnnnnnnnnnnnnnnnnnnnnnnnnnnnnnnnnnnnnnnnnnnnnnnnnnnnnnnnnnnnnnnnnnnnnnnnnnnnnnnnnnnnnnnnnnnnnnnnnnnnnnnnnnnnnnnnnnnnnnnnnnnnnnnnnnnnnnnnnnnnnnnnnnnnnnnnnnnnnnnnnnnnnnnnnnnnnnnnnnnnnnnnnnnnnnnnnnnnnnnnnnnnnnnnnnnnnnnnnnnnnnnnnnnnnnnnnnnnnnnnnnnnnnnnnnnnnnnnnnnnnnnnnnnnnnnnnnnnnnnnnnnnnnnnnnnnnnnnnnnnnnnnnnnnnnnnnnnnnnnnnnnnnnnnnnnnnnnnnnnnnnnnnnnnnnnnnnnnnnnnnnnnnnnnnnnnnnnnnnnnnnnnnnnnnnnnnnnnnnnnnnnnnnnnnnnnnnnnnnnnnnnnnnnnnnnnnnnnnnnnnnnnnnnnnnnnnnnnnnnnnnnnnnnnnnnnnnnnnnnnnnnnnnnnnnnnnnnnnnnnnnnnnnnnnnnnnnnnnnnnnnnnnnnnnnnnnnnnnnnnnnnnnnnnnnnnnnnnnnnnnnnnnnnnnnnnnnnnnnnnnnnnnnnnnnnnnnnnnnnnnnnnnnnnnnnnnnnnnnnnnnnnnnnnnnnnnnnnnnnnnnnnnnnnnnnnnnnnnnnnnnnnnnnnnnnnnnnnnnnnnnnnnnnnnnnnnnnnnnnnnnnnnnnnnnnnnnnnnnnnnnnnnnnnnnnnnnnnnnnnnnnnnnnnnnnnnnnnnnnnnnnnnnnnnnnnnnnnnnnnnnnnnnnnnnnnnnnnnnnnnnnnnnnnnnnnnnnnnnnnnnnnnnnnnnnnnnnnnnnnnnnnnnnnnnnnnnnnnnnnnnnnnnnnnnnnnnnnnnnnnnnnnnnnnnnnnnnnnnnnnnnnnnnnnnnnnnnnnnnnnnnnnnnnnnnnnnnnnnnnnnnnnnnnnnnnnnnnnnnnnnnnnnnnnnnnnnnnnnnnnnnnnnnnnnnnnnnnnnnnnnnnnnnnnnnnnnnnnnnnnnnnnnnnnnnnnnnnnnnnnnnnnnnnnnnnnnnnnnnnnnnnnnnnnnnnnnnnnnnnnnnnnnnnnnnnnnnnnnnnnnnnnnnnnnnnnnnnnnnnnnnnnnnnnnnnnnnnnnnnnnnnnnnnnnnnnnnnnnnnnnnnnnnnnnnnnnnnnnnnnnnnnnnnnnnnnnnnnnnnnnnnnnnnnnnnnnnnnnnnnnnnnnnnnnnnnnnnnnnnnnnnnnnnnnnnnnnnnnnnnnnnnnnnnnnnnnnnnnnnnnnnnnnnnnnnnnnnnnnnnnnnnnnnnnnnnnnnnnnnnnnnnnnnnnnnnnnnnnnnnnnnnnnnnnnnnnnnnnnnnnnnnnnnnnnnnnnnnnnnnnnnnnnnnnnnnnnnnnnnnnnnnnnnnnnnnnnnnnnnnnnnnnnnnnnnnnnnnnnnnnnnnnnnnnnnnnnnnnnnnnnnnnnnnnnnnnnnnnnnnnnnnnnnnnnnnnnnnnnnnnnnnnnnnnnnnnnnnnnnnnnnnnnnnnnnnnnnnnnnnnnnnnnnnnnnnnnnnnnnnnnnnnnnnnnnnnnnnnnnnnnnnnnnnnnnnnnnnnnnnnnnnnnnnnnnnnnnnnnnnnnnnnnnnnnnnnnnnnnnnnnnnnnnnnnnnnnnnnnnnnnnnnnnnnnnnnnnnnnnnnnnnnnnnnnnnnnnnnnnnnnnnnnnnnnnnnnnnnnnnnnnnnnnnnnnnnnnnnnnnnnnnnnnnnnnnnnnnnnnnnnnnnnnnnnnnnnnnnnnnnnnnnnnnnnnnnnnnnnnnnnnnnnnnnnnnnnnnnnnnnnnnnnnnnnnnnnnnnnnnnnnnnnnnnnnnnnnnnnnnnnnnnnnnnnnnnnnnnnnnnnnnnnnnnnnnnnnnnnnnnnnnnnnnnnnnnnnnnnnnnnnnnnnnnnnnnnnnnnnnnnnnnnnnnnnnnnnnnnnnnnnnnnnnnnnnnnnnnnnnnnnnnnnnnnnnnnnnnnnnnnnnnnnnnnnnnnnnnnnnnnnnnnnnnnnnnnnnnnnnnnnnnnnnnnnnnnnnnnnnnnnnnnnnnnnnnnnnnnnnnnnnnnnnnnnnnnnnnnnnnnnnnnnnnnnnnnnnnnnnnnnnnnnnnnnnnnnnnnnnnnnnnnnnnnnnnnnnnnnnnnnnnnnnnnnnnnnnnnnnnnnnnnnnnnnnnnnnnnnnnnnnnnnnnnnnnnnnnnnnnnnnnnnnnnnnnnnnnnnnnnnnnnnnnnnnnnnnnnnnnnnnnnnnnnnnnnnnnnnnnnnnnnnnnnnnnnnnnnnnnnnnnnnnnnnnnnnnnnnnnnnnnnnnnnnnnnnnnnnnnnnnnnnnnnnnnnnnnnnnnnnnnnnnnnnnnnnnnnnnnnnnnnnnnnnnnnnnnnnnnnnnnnnnnnnnnnnnnnnnnnnnnnnnnnnnnnnnnnnnnnnnnnnnnnnnnnnnnnnnnnnnnnnnnnnnnnnnnnnnnnnnnnnnnnnnnnnnnnnnnnnnnnnnnnnnnnnnnnnnnnnnnnnnnnnnnnnnnnnnnnnnnnnnnnnnnnnnnnnnnnnnnnnnnnnnnnnnnnnnnnnnnnnnnnnnnnnnnnnnnnnnnnnnnnnnnnnnnnnnnnnnnnnnnnnnnnnnnnnnnnnnnnnnnnnnnnnnnnnnnnnnnnnnnnnnnnnnnnnnnnnnnnnnnnnnnnnnnnnnnnnnnnnnnnnnnnnnnnnnnnnnnnnnnnnnnnnnnnnnnnnnnnnnnnnnnnnnnnnnnnnnnnnnnnnnnnnnnnnnnnnnnnnnnnnnnnnnnnnnnnnnnnnnnnnnnnnnnnnnnnnnnnnnnnnnnnnnnnnnnnnnnnnnnnnnnnnnnnnnnnnnnnnnnnnnnnnnnnnnnnnnnnnnnnnnnnnnnnnnnnnnnnnnnnnnnnnnnnnnnnnnnnnnnnnnnnnnnnnnnnnnnnnnnnnnnnnnnnnnnnnnnnnnnnnnnnnnnnnnnnnnnnnnnnnnnnnnnnnnnnnnnnnnnnnnnnnnnnnnnnnnnnnnnnnnnnnnnnnnnnnnnnnnnnnnnnnnnnnnnnnnnnnnnnnnnnnnnnnnnnnnnnnnnnnnnnnnnnnnnnnnnnnnnnnnnnnnnnnnnnnnnnnnnnnnnnnnnnnnnnnnnnnnnnnnnnnnnnnnnnnnnnnnnnnnnnnnnnnnnnnnnnnnnnnnnnnnnnnnnnnnnnnnnnnnnnnnnnnnnnnnnnnnnnnnnnnnnnnnnnnnnnnnnnnnnnnnnnnnnnnnnnnnnnnnnnnnnnnnnnnnnnnnnnnnnnnnnnnnnnnnnnnnnnnnnnnnnnnnnnnnnnnnnnnnnnnnnnnnnnnnnnnnnnnnnnnnnnnnnnnnnnnnnnnnnnnnnnnnnnnnnnnnnnnnnnnnnnnnnnnnnnnnnnnnnnnnnnnnnnnnnnnnnnnnnnnnnnnnnnnnnnnnnnnnnnnnnnnnnnnnnnnnnnnnnnnnnnnnnnnnnnnnnnnnnnnnnnnnnnnnnnnnnnnnnnnnnnnnnnnnnnnnnnnnnnnnnnnnnnnnnnnnnnnnnnnnnnnnnnnnnnnnnnnnnnnnnnnnnnnnnnnnnnnnnnnnnnnnnnnnnnnnnnnnnnnnnnnnnnnnnnnnnnnnnnnnnnnnnnnnnnnnnnnnnnnnnnnnnnnnnnnnnnnnnnnnnnnnnnnnnnnnnnnnnnnnnnnnnnnnnnnnnnnnnnnnnnnnnnnnnnnnnnnnnnnnnnnnnnnnnnnnnnnnnnnnnnnnnnnnnnnnnnnnnnnnnnnnnnnnnnnnnnnnnnnnnnnnnnnnnnnnnnnnnnnnnnnnnnnnnnnnnnnnnnnnnnnnnnnnnnnnnnnnnnnnnnnnnnnnnnnnnnnnnnnnnnnnnnnnnnnnnnnnnnnnnnnnnnnnnnnnnnnnnnnnnnnnnnnnnnnnnnnnnnnnnnnnnnnnnnnnnnnnnnnnnnnnnnnnnnnnnnnnnnnnnnnnnnnnnnnnnnnnnnnnnnnnnnnnnnnnnnnnnnnnnnnnnnnnnnnnnnnnnnnnnnnnnnnnnnnnnnnnnnnnnnnnnnnnnnnnnnnnnnnnnnnnnnnnnnnnnnnnnnnnnnnnnnnnnnnnnnnnnnnnnnnnnnnnnnnnnnnnnnnnnnnnnnnnnnnnnnnnnnnnnnnnnnnnnnnnnnnnnnnnnnnnnnnnnnnnnnnnnnnnnnnnnnnnnnnnnnnnnnnnnnnnnnnnnnnnnnnnnnnnnnnnnnnnnnnnnnnnnnnnnnnnnnnnnnnnnnnnnnnnnnnnnnnnnnnnnnnnnnnnnnnnnnnnnnnnnnnnnnnnnnnnnnnnnnnnnnnnnnnnnnnnnnnnnnnnnnnnnnnnnnnnnnnnnnnnnnnnnnnnnnnnnnnnnnnnnnnnnnnnnnnnnnnnnnnnnnnnnnnnnnnnnnnnnnnnnnnnnnnnnnnnnnnnnnnnnnnnnnnnnnnnnnnnnnnnnnnnnnnnnnnnnnnnnnnnnnnnnnnnnnnnnnnnnnnnnnnnnnnnnnnnnnnnnnnnnnnnnnnnnnnnnnnnnnnnnnnnnnnnnnnnnnnnnnnnnnnnnnnnnnnnnnnnnnnnnnnnnnnnnnnnnnnnnnnnnnnnnnnnnnnnnnnnnnnnnnnnnnnnnnnnnnnnnnnnnnnnnnnnnnnnnnnnnnnnnnnnnnnnnnnnnnnnnnnnnnnnnnnnnnnnnnnnnnnnnnnnnnnnnnnnnnnnnnnnnnnnnnnnnnnnnnnnnnnnnnnnnnnnnnnnnnnnnnnnnnnnnnnnnnnnnnnnnnnnnnnnnnnnnnnnnnnnnnnnnnnnnnnnnnnnnnnnnnnnnnnnnnnnnnnnnnnnnnnnnnnnnnnnnnnnnnnnnnnnnnnnnnnnnnnnnnnnnnnnnnnnnnnnnnnnnnnnnnnnnnnnnnnnnnnnnnnnnnnnnnnnnnnnnnnnnnnnnnnnnnnnnnnnnnnnnnnnnnnnnnnnnnnnnnnnnnnnnnnnnnnnnnnnnnnnnnnnnnnnnnnnnnnnnnnnnnnnnnnnnnnnnnnnnnnnnnnnnnnnnnnnnnnnnnnnnnnnnnnnnnnnnnnnnnnnnnnnnnnnnnnnnnnnnnnnnnnnnnnnnnnnnnnnnnnnnnnnnnnnnnnnnnnnnnnnnnnnnnnnnnnnnnnnnnnnnnnnnnnnnnnnnnnnnnnnnnnnnnnnnnnnnnnnnnnnnnnnnnnnnnnnnnnnnnnnnnnnnnnnnnnnnnnnnnnnnnnnnnnnnnnnnnnnnnnnnnnnnnnnnnnnnnnnnnnnnnnnnnnnnnnnnnnnnnnnnnnnnnnnnnnnnnnnnnnnnnnnnnnnnnnnnnnnnnnnnnnnnnnnnnnnnnnnnnnnnnnnnnnnnnnnnnnnnnnnnnnnnnnnnnnnnnnnnnnnnnnnnnnnnnnnnnnnnnnnnnnnnnnnnnnnnnnnnnnnnnnnnnnnnnnnnnnnnnnnnnnnnnnnnnnnnnnnnnnnnnnnnnnnnnnnnnnnnnnnnnnnnnnnnnnnnnnnnnnnnnnnnnnnnnnnnnnnnnnnnnnnnnnnnnnnnnnnnnnnnnnnnnnnnnnnnnnnnnnnnnnnnnnnnnnnnnnnnnnnnnnnnnnnnnnnnnnnnnnnnnnnnnnnnnnnnnnnnnnnnnnnnnnnnnnnnnnnnnnnnnnnnnnnnnnnnnnnnnnnnnnnnnnnnnnnnnnnnnnnnnnnnnnnnnnnnnnnnnnnnnnnnnnnnnnnnnnnnnnnnnnnnnnnnnnnnnnnnnnnnnnnnnnnnnnnnnnnnnnnnnnnnnnnnnnnnnnnnnnnnnnnnnnnnnnnnnnnnnnnnnnnnnnnnnnnnnnnnnnnnnnnnnnnnnnnnnnnnnnnnnnnnnnnnnnnnnnnnnnnnnnnnnnnnnnnnnnnnnnnnnnnnnnnnnnnnnnnnnnnnnnnnnnnnnnnnnnnnnnnnnnnnnnnnnnnnnnnnnnnnnnnnnnnnnnnnnnnnnnnnnnnnnnnnnnnnnnnnnnnnnnnnnnnnnnnnnnnnnnnnnnnnnnnnnnnnnnnnnnnnnnnnnnnnnnnnnnnnnnnnnnnnnnnnnnnnnnnnnnnnnnnnnnnnnnnnnnnnnnnnnnnnnnnnnnnnnnnnnnnnnnnnnnnnnnnnnnnnnnnnnnnnnnnnnnnnnnnnnnnnnnnnnnnnnnnnnnnnnnnnnnnnnnnnnnnnnnnnnnnnnnnnnnnnnnnnnnnnnnnnnnnnnnnnnnnnnnnnnnnnnnnnnnnnnnnnnnnnnnnnnnnnnnnnnnnnnnnnnnnnnnnnnnnnnnnnnnnnnnnnnnnnnnnnnnnnnnnnnnnnnnnnnnnnnnnnnnnnnnnnnnnnnnnnnnnnnnnnnnnnnnnnnnnnnnnnnnnnnnnnnnnnnnnnnnnnnnnnnnnnnnnnnnnnnnnnnnnnnnnnnnnnnnnnnnnnnnnnnnnnnnnnnnnnnnnnnnnnnnnnnnnnnnnnnnnnnnnnnnnnnnnnnnnnnnnnnnnnnnnnnnnnnnnnnnnnnnnnnnnnnnnnnnnnnnnnnnnnnnnnnnnnnnnnnnnnnnnnnnnnnnnnnnnnnnnnnnnnnnnnnnnnnnnnnnnnnnnnnnnnnnnnnnnnnnnnnnnnnnnnnnnnnnnnnnnnnnnnnnnnnnnnnnnnnnnnnnnnnnnnnnnnnnnnnnnnnnnnnnnnnnnnnnnnnnnnnnnnnnnnnnnnnnnnnnnnnnnnnnnnnnnnnnnnnnnnnnnnnnnnnnnnnnnnnnnnnnnnnnnnnnnnnnnnnnnnnnnnnnnnnnnnnnnnnnnnnnnnnnnnnnnnnnnnnnnnnnnnnnnnnnnnnnnnnnnnnnnnnnnnnnnnnnnnnnnnnnnnnnnnnnnnnnnnnnnnnnnnnnnnnnnnnnnnnnnnnnnnnnnnnnnnnnnnnnnnnnnnnnnnnnnnnnnnnnnnnnnnnnnnnnnnnnnnnnnnnnnnnnnnnnnnnnnnnnnnnnnnnnnnnnnnnnnnnnnnnnnnnnnnnnnnnnnnnnnnnnnnnnnnnnnnnnnnnnnnnnnnnnnnnnnnnnnnnnnnnnnnnnnnnnnnnnnnnnnnnnnnnnnnnnnnnnnnnnnnnnnnnnnnnnnnnnnnnnnnnnnnnnnnnnnnnnnnnnnnnnnnnnnnnnnnnnnnnnnnnnnnnnnnnnnnnnnnnnnnnnnnnnnnnnnnnnnnnnnnnnnnnnnnnnnnnnnnnnnnnnnnnnnnnnnnnnnnnnnnnnnnnnnnnnnnnnnnnnnnnnnnnnnnnnnnnnnnnnnnnnnnnnnnnnnnnnnnnnnnnnnnnnnnnnnnnnnnnnnnnnnnnnnnnnnnnnnnnnnnnnnnnnnnnnnnnnnnnnnnnnnnnnnnnnnnnnnnnnnnnnnnnnnnnnnnnnnnnnnnnnnnnnnnnnnnnnnnnnnnnnnnnnnnnnnnnnnnnnnnnnnnnnnnnnnnnnnnnnnnnnnnnnnnnnnnnnnnnnnnnnnnnnnnnnnnnnnnnnnnnnnnnnnnnnnnnnnnnnnnnnnnnnnnnnnnnnnnnnnnnnnnnnnnnnnnnnnnnnnnnnnnnnnnnnnnnnnnnnnnnnnnnnnnnnnnnnnnnnnnnnnnnnnnnnnnnnnnnnnnnnnnnnnnnnnnnnnnnnnnnnnnnnnnnnnnnnnnnnnnnnnnnnnnnnnnnnnnnnnnnnnnnnnnnnnnnnnnnnnnnnnnnnnnnnnnnnnnnnnnnnnnnnnnnnnnnnnnnnnnnnnnnnnnnnnnnnnnnnnnnnnnnnnnnnnnnnnnnnnnnnnnnnnnnnnnnnnnnnnnnnnnnnnnnnnnnnnnnnnnnnnnnnnnnnnnnnnnnnnnnnnnnnnnnnnnnnnnnnnnnnnnnnnnnnnnnnnnnnnnnnnnnnnnnnnnnnnnnnnnnnnnnnnnnnnnnnnnnnnnnnnnnnnnnnnnnnnnnnnnnnnnnnnnnnnnnnnnnnnnnnnnnnnnnnnnnnnnnnnnnnnnnnnnnnnnnnnnnnnnnnnnnnnnnnnnnnnnnnnnnnnnnnnnnnnnnnnnnnnnnnnnnnnnnnnnnnnnnnnnnnnnnnnnnnnnnnnnnnnnnnnnnnnnnnnnnnnnnnnnnnnnnnnnnnnnnnnnnnnnnnnnnnnnnnnnnnnnnnnnnnnnnnnnnnnnnnnnnnnnnnnnnnnnnnnnnnnnnnnnnnnnnnnnnnnnnnnnnnnnnnnnnnnnnnnnnnnnnnnnnnnnnnnnnnnnnnnnnnnnnnnnnnnnnnnnnnnnnnnnnnnnnnnnnnnnnnnnnnnnnnnnnnnnnnnnnnnnnnnnnnnnnnnnnnnnnnnnnnnnnnnnnnnnnnnnnnnnnnnnnnnnnnnnnnnnnnnnnnnnnnnnnnnnnnnnnnnnnnnnnnnnnnnnnnnnnnnnnnnnnnnnnnnnnnnnnnnnnnnnnnnnnnnnnnnnnnnnnnnnnnnnnnnnnnnnnnnnnnnnnnnnnnnnnnnnnnnnnnnnnnnnnnnnnnnnnnnnnnnnnnnnnnnnnnnnnnnnnnnnnnnnnnnnnnnnnnnnnnnnnnnnnnnnnnnnnnnnnnnnnnnnnnnnnnnnnnnnnnnnnnnnnnnnnnnnnnnnnnnnnnnnnnnnnnnnnnnnnnnnnnnnnnnnnnnnnnnnnnnnnnnnnnnnnnnnnnnnnnnnnnnnnnnnnnnnnnnnnnnnnnnnnnnnnnnnnnnnnnnnnnnnnnnnnnnnnnnnnnnnnnnnnnnnnnnnnnnnnnnnnnnnnnnnnnnnnnnnnnnnnnnnnnnnnnnnnnnnnnnnnnnnnnnnnnnnnnnnnnnnnnnnnnnnnnnnnnnnnnnnnnnnnnnnnnnnnnnnnnnnnnnnnnnnnnnnnnnnnnnnnnnnnnnnnnnnnnnnnnnnnnnnnnnnnnnnnnnnnnnnnnnnnnnnnnnnnnnnnnnnnnnnnnnnnnnnnnnnnnnnnnnnnnnnnnnnnnnnnnnnnnnnnnnnnnnnnnnnnnnnnnnnnnnnnnnnnnnnnnnnnnnnnnnnnnnnnnnnnnnnnnnnnnnnnnnnnnnnnnnnnnnnnnnnnnnnnnnnnnnnnnnnnnnnnnnnnnnnnnnnnnnnnnnnnnnnnnnnnnnnnnnnnnnnnnnnnnnnnnnnnnnnnnnnnnnnnnnnnnnnnnnnnnnnnnnnnnnnnnnnnnnnnnnnnnnnnnnnnnnnnnnnnnnnnnnnnnnnnnnnnnnnnnnnnnnnnnnnnnnnnnnnnnnnnnnnnnnnnnnnnnnnnnnnnnnnnnnnnnnnnnnnnnnnnnnnnnnnnnnnnnnnnnnnnnnnnnnnnnnnnnnnnnnnnnnnnnnnnnnnnnnnnnnnnnnnnnnnnnnnnnnnnnnnnnnnnnnnnnnnnnnnnnnnnnnnnnnnnnnnnnnnnnnnnnnnnnnnnnnnnnnnnnnnnnnnnnnnnnnnnnnnnnnnnnnnnnnnnnnnnnnnnnnnnnnnnnnnnnnnnnnnnnnnnnnnnnnnnnnnnnnnnnnnnnnnnnnnnnnnnnnnnnnnnnnnnnnnnnnnnnnnnnnnnnnnnnnnnnnnnnnnnnnnnnnnnnnnnnnnnnnnnnnnnnnnnnnnnnnnnnnnnnnnnnnnnnnnnnnnnnnnnnnnnnnnnnnnnnnnnnnnnnnnnnnnnnnnnnnnnnnnnnnnnnnnnnnnnnnnnnnnnnnnnnnnnnnnnnnnnnnnnnnnnnnnnnnnnnnnnnnnnnnnnnnnnnnnnnnnnnnnnnnnnnnnnnnnnnnnnnnnnnnnnnnnnnnnnnnnnnnnnnnnnnnnnnnnnnnnnnnnnnnnnnnnnnnnnnnnnnnnnnnnnnnnnnnnnnnnnnnnnnnnnnnnnnnnnnnnnnnnnnnnnnnnnnnnnnnnnnnnnnnnnnnnnnnnnnnnnnnnnnnnnnnnnnnnnnnnnnnnnnnnnnnnnnnnnnnnnnnnnnnnnnnnnnnnnnnnnnnnnnnnnnnnnnnnnnnnnnnnnnnnnnnnnnnnnnnnnnnnnnnnnnnnnnnnnnnnnnnnnnnnnnnnnnnnnnnnnnnnnnnnnnnnnnnnnnnnnnnnnnnnnnnnnnnnnnnnnnnnnnnnnnnnnnnnnnnnnnnnnnnnnnnnnnnnnnnnnnnnnnnnnnnnnnnnnnnnnnnnnnnnnnnnnnnnnnnnnnnnnnnnnnnnnnnnnnnnnnnnnnnnnnnnnnnnnnnnnnnnnnnnnnnnnnnnnnnnnnnnnnnnnnnnnnnnnnnnnnnnnnnnnnnnnnnnnnnnnnnnnnnnnnnnnnnnnnnnnnnnnnnnnnnnnnnnnnnnnnnnnnnnnnnnnnnnnnnnnnnnnnnnnnnnnnnnnnnnnnnnnnnnnnnnnnnnnnnnnnnnnnnnnnnnnnnnnnnnnnnnnnnnnnnnnnnnnnnnnnnnnnnnnnnnnnnnnnnnnnnnnnnnnnnnnnnnnnnnnnnnnnnnnnnnnnnnnnnnnnnnnnnnnnnnnnnnnnnnnnnnnnnnnnnnnnnnnnnnnnnnnnnnnnnnnnnnnnnnnnnnnnnnnnnnnnnnnnnnnnnnnnnnnnnnnnnnnnnnnnnnnnnnnnnnnnnnnnnnnnnnnnnnnnnnnnnnnnnnnnnnnnnnnnnnnnnnnnnnnnnnnnnnnnnnnnnnnnnnnnnnnnnnnnnnnnnnnnnnnnnnnnnnnnnnnnnnnnnnnnnnnnnnnnnnnnnnnnnnnnnnnnnnnnnnnnnnnnnnnnnnnnnnnnnnnnnnnnnnnnnnnnnnnnnnnnnnnnnnnnnnnnnnnnnnnnnnnnnnnnnnnnnnnnnnnnnnnnnnnnnnnnnnnnnnnnnnnnnnnnnnnnnnnnnnnnnnnnnnnnnnnnnnnnnnnnnnnnnnnnnnnnnnnnnnnnnnnnnnnnnnnnnnnnnnnnnnnnnnnnnnnnnnnnnnnnnnnnnnnnnnnnnnnnnnnnnnnnnnnnnnnnnnnnnnnnnnnnnnnnnnnnnnnnnnnnnnnnnnnnnnnnnnnnnnnnnnnnnnnnnnnnnnnnnnnnnnnnnnnnnnnnnnnnnnnnnnnnnnnnnnnnnnnnnnnnnnnnnnnnnnnnnnnnnnnnnnnnnnnnnnnnnnnnnnnnnnnnnnnnnnnnnnnnnnnnnnnnnnnnnnnnnnnnnnnnnnnnnnnnnnnnnnnnnnnnnnnnnnnnnnnnnnnnnnnnnnnnnnnnnnnnnnnnnnnnnnnnnnnnnnnnnnnnnnnnnnnnnnnnnnnnnnnnnnnnnnnnnnnnnnnnnnnnnnnnnnnnnnnnnnnnnnnnnnnnnnnnnnnnnnnnnnnnnnnnnnnnnnnnnnnnnnnnnnnnnnnnnnnnnnnnnnnnnnnnnnnnnnnnnnnnnnnnnnnnnnnnnnnnnnnnnnnnnnnnnnnnnnnnnnnnnnnnnnnnnnnnnnnnnnnnnnnnnnnnnnnnnnnnnnnnnnnnnnnnnnnnnnnnnnnnnnnnnnnnnnnnnnnnnnnnnnnnnnnnnnnnnnnnnnnnnnnnnnnnnnnnnnnnnnnnnnnnnnnnnnnnnnnnnnnnnnnnnnnnnnnnnnnnnnnnnnnnnnnnnnnnnnnnnnnnnnnnnnnnnnnnnnnnnnnnnnnnnnnnnnnnnnnnnnnnnnnnnnnnnnnnnnnnnnnnnnnnnnnnnnnnnnnnnnnnnnnnnnnnnnnnnnnnnnnnnnnnnnnnnnnnnnnnnnnnnnnnnnnnnnnnnnnnnnnnnnnnnnnnnnnnnnnnnnnnnnnnnnnnnnnnnnnnnnnnnnnnnnnnnnnnnnnnnnnnnnnnnnnnnnnnnnnnnnnnnnnnnnnnnnnnnnnnnnnnnnnnnnnnnnnnnnnnnnnnnnnnnnnnnnnnnnnnnnnnnnnnnnnnnnnnnnnnnnnnnnnnnnnnnnnnnnnnnnnnnnnnnnnnnnnnnnnnnnnnnnnnnnnnnnnnnnnnnnnnnnnnnnnnnnnnnnnnnnnnnnnnnnnnnnnnnnnnnnnnnnnnnnnnnnnnnnnnnnnnnnnnnnnnnnnnnnnnnnnnnnnnnnnnnnnnnnnnnnnnnnnnnnnnnnnnnnnnnnnnnnnnnnnnnnnnnnnnnnnnnnnnnnnnnnnnnnnnnnnnnnnnnnnnnnnnnnnnnnnnnnnnnnnnnnnnnnnnnnnnnnnnnnnnnnnnnnnnnnnnnnnnnnnnnnnnnnnnnnnnnnnnnnnnnnnnnnnnnnnnnnnnnnnnnnnnnnnnnnnnnnnnnnnnnnnnnnnnnnnnnnnnnnnnnnnnnnnnnnnnnnnnnnnnnnnnnnnnnnnnnnnnnnnnnnnnnnnnnnnnnnnnnnnnnnnnnnnnnnnnnnnnnnnnnnnnnnnnnnnnnnnnnnnnnnnnnnnnnnnnnnnnnnnnnnnnnnnnnnnnnnnnnnnnnnnnnnnnnnnnnnnnnnnnnnnnnnnnnnnnnnnnnnnnnnnnnnnnnnnnnnnnnnnnnnnnnnnnnnnnnnnnnnnnnnnnnnnnnnnnnnnnnnnnnnnnnnnnnnnnnnnnnnnnnnnnnnnnnnnnnnnnnnnnnnnnnnnnnnnnnnnnnnnnnnnnnnnnnnnnnnnnnnnnnnnnnnnnnnnnnnnnnnnnnnnnnnnnnnnnnnnnnnnnnnnnnnnnnnnnnnnnnnnnnnnnnnnnnnnnnnnnnnnnnnnnnnnnnnnnnnnnnnnnnnnnnnnnnnnnnnnnnnnnnnnnnnnnnnnnnnnnnnnnnnnnnnnnnnnnnnnnnnnnnnnnnnnnnnnnnnnnnnnnnnnnnnnnnnnnnnnnnnnnnnnnnnnnnnnnnnnnnnnnnnnnnnnnnnnnnnnnnnnnnnnnnnnnnnnnnnnnnnnnnnnnnnnnnnnnnnnnnnnnnnnnnnnnnnnnnnnnnnnnnnnnnnnnnnnnnnnnnnnnnnnnnnnnnnnnnnnnnnnnnnnnnnnnnnnnnnnnnnnnnnnnnnnnnnnnnnnnnnnnnnnnnnnnnnnnnnnnnnnnnnnnnnnnnnnnnnnnnnnnnnnnnnnnnnnnnnnnnnnnnnnnnnnnnnnnnnnnnnnnnnnnnnnnnnnnnnnnnnnnnnnnnnnnnnnnnnnnnnnnnnnnnnnnnnnnnnnnnnnnnnnnnnnnnnnnnnnnnnnnnnnnnnnnnnnnnnnnnnnnnnnnnnnnnnnnnnnnnnnnnnnnnnnnnnnnnnnnnnnnnnnnnnnnnnnnnnnnnnnnnnnnnnnnnnnnnnnnnnnnnnnnnnnnnnnnnnnnnnnnnnnnnnnnnnnnnnnnnnnnnnnnnnnnnnnnnnnnnnnnnnnnnnnnnnnnnnnnnnnnnnnnnnnnnnnnnnnnnnnnnnnnnnnnnnnnnnnnnnnnnnnnnnnnnnnnnnnnnnnnnnnnnnnnnnnnnnnnnnnnnnnnnnnnnnnnnnnnnnnnnnnnnnnnnnnnnnnnnnnnnnnnnnnnnnnnnnnnnnnnnnnnnnnnnnnnnnnnnnnnnnnnnnnnnnnnnnnnnnnnnnnnnnnnnnnnnnnnnnnnnnnnnnnnnnnnnnnnnnnnnnnnnnnnnnnnnnnnnnnnnnnnnnnnnnnnnnnnnnnnnnnnnnnnnnnnnnnnnnnnnnnnnnnnnnnnnnnnnnnnnnnnnnnnnnnnnnnnnnnnnnnnnnnnnnnnnnnnnnnnnnnnnnnnnnnnnnnnnnnnnnnnnnnnnnnnnnnnnnnnnnnnnnnnnnnnnnnnnnnnnnnnnnnnnnnnnnnnnnnnnnnnnnnnnnnnnnnnnnnnnnnnnnnnnnnnnnnnnnnnnnnnnnnnnnnnnnnnnnnnnnnnnnnnnnnnnnnnnnnnnnnnnnnnnnnnnnnnnnnnnnnnnnnnnnnnnnnnnnnnnnnnnnnnnnnnnnnnnnnnnnnnnnnnnnnnnnnnnnnnnnnnnnnnnnnnnnnnnnnnnnnnnnnnnnnnnnnnnnnnnnnnnnnnnnnnnnnnnnnnnnnnnnnnnnnnnnnnnnnnnnnnnnnnnnnnnnnnnnnnnnnnnnnnnnnnnnnnnnnnnnnnnnnnnnnnnnnnnnnnnnnnnnnnnnnnnnnnnnnnnnnnnnnnnnnnnnnnnnnnnnnnnnnnnnnnnnnnnnnnnnnnnnnnnnnnnnnnnnnnnnnnnnnnnnnnnnnnnnnnnnnnnnnnnnnnnnnnnnnnnnnnnnnnnnnnnnnnnnnnnnnnnnnnnnnnnnnnnnnnnnnnnnnnnnnnnnnnnnnnnnnnnnnnnnnnnnnnnnnnnnnnnnnnnnnnnnnnnnnnnnnnnnnnnnnnnnnnnnnnnnnnnnnnnnnnnnnnnnnnnnnnnnnnnnnnnnnnnnnnnnnnnnnnnnnnnnnnnnnnnnnnnnnnnnnnnnnnnnnnnnnnnnnnnnnnnnnnnnnnnnnnnnnnnnnnnnnnnnnnnnnnnnnnnnnnnnnnnnnnnnnnnnnnnnnnnnnnnnnnnnnnnnnnnnnnnnnnnnnnnnnnnnnnnnnnnnnnnnnnnnnnnnnnnnnnnnnnnnnnnnnnnnnnnnnnnnnnnnnnnnnnnnnnnnnnnnnnnnnnnnnnnnnnnnnnnnnnnnnnnnnnnnnnnnnnnnnnnnnnnnnnnnnnnnnnnnnnnnnnnnnnnnnnnnnnnnnnnnnnnnnnnnnnnnnnnnnnnnnnnnnnnnnnnnnnnnnnnnnnnnnnnnnnnnnnnnnnnnnnnnnnnnnnnnnnnnnnnnnnnnnnnnnnnnnnnnnnnnnnnnnnnnnnnnnnnnnnnnnnnnnnnnnnnnnnnnnnnnnnnnnnnnnnnnnnnnnnnnnnnnnnnnnnnnnnnnnnnnnnnnnnnnnnnnnnnnnnnnnnnnnnnnnnnnnnnnnnnnnnnnnnnnnnnnnnnnnnnnnnnnnnnnnnnnnnnnnnnnnnnnnnnnnnnnnnnnnnnnnnnnnnnnnnnnnnnnnnnnnnnnnnnnnnnnnnnnnnnnnnnnnnnnnnnnnnnnnnnnnnnnnnnnnnnnnnnnnnnnnnnnnnnnnnnnnnnnnnnnnnnnnnnnnnnnnnnnnnnnnnnnnnnnnnnnnnnnnnnnnnnnnnnnnnnnnnnnnnnnnnnnnnnnnnnnnnnnnnnnnnnnnnnnnnnnnnnnnnnnnnnnnnnnnnnnnnnnnnnnnnnnnnnnnnnnnnnnnnnnnnnnnnnnnnnnnnnnnnnnnnnnnnnnnnnnnnnnnnnnnnnnnnnnnnnnnnnnnnnnnnnnnnnnnnnnnnnnnnnnnnnnnnnnnnnnnnnnnnnnnnnnnnnnnnnnnnnnnnnnnnnnnnnnnnnnnnnnnnnnnnnnnnnnnnnnnnnnnnnnnnnnnnnnnnnnnnnnnnnnnnnnnnnnnnnnnnnnnnnnnnnnnnnnnnnnnnnnnnnnnnnnnnnnnnnnnnnnnnnnnnnnnnnnnnnnnnnnnnnnnnnnnnnnnnnnnnnnnnnnnnnnnnnnnnnnnnnnnnnnnnnnnnnnnnnnnnnnnnnnnnnnnnnnnnnnnnnnnnnnnnnnnnnnnnnnnnnnnnnnnnnnnnnnnnnnnnnnnnnnnnnnnnnnnnnnnnnnnnnnnnnnnnnnnnnnnnnnnnnnnnnnnnnnnnnnnnnnnnnnnnnnnnnnnnnnnnnnnnnnnnnnnnnnnnnnnnnnnnnnnnnnnnnnnnnnnnnnnnnnnnnnnnnnnnnnnnnnnnnnnnnnnnnnnnnnnnnnnnnnnnnnnnnnnnnnnnnnnnnnnnnnnnnnnnnnnnnnnnnnnnnnnnnnnnnnnnnnnnnnnnnnnnnnnnnnnnnnnnnnnnnnnnnnnnnnnnnnnnnnnnnnnnnnnnnnnnnnnnnnnnnnnnnnnnnnnnnnnnnnnnnnnnnnnnnnnnnnnnnnnnnnnnnnnnnnnnnnnnnnnnnnnnnnnnnnnnnnnnnnnnnnnnnnnnnnnnnnnnnnnnnnnnnnnnnnnnnnnnnnnnnnnnnnnnnnnnnnnnnnnnnnnnnnnnnnnnnnnnnnnnnnnnnnnnnnnnnnnnnnnnnnnnnnnnnnnnnnnnnnnnnnnnnnnnnnnnnnnnnnnnnnnnnnnnnnnnnnnnnnnnnnnnnnnnnnnnnnnnnnnnnnnnnnnnnnnnnnnnnnnnnnnnnnnnnnnnnnnnnnnnnnnnnnnnnnnnnnnnnnnnnnnnnnnnnnnnnnnnnnnnnnnnnnnnnnnnnnnnnnnnnnnnnnnnnnnnnnnnnnnnnnnnnnnnnnnnnnnnnnnnnnnnnnnnnnnnnnnnnnnnnnnnnnnnnnnnnnnnnnnnnnnnnnnnnnnnnnnnnnnnnnnnnnnnnnnnnnnnnnnnnnnnnnnnnnnnnnnnnnnnnnnnnnnnnnnnnnnnnnnnnnnnnnnnnnnnnnnnnnnnnnnnnnnnnnnnnnnnnnnnnnnnnnnnnnnnnnnnnnnnnnnnnnnnnnnnnnnnnnnnnnnnnnnnnnnnnnnnnnnnnnnnnnnnnnnnnnnnnnnnnnnnnnnnnnnnnnnnnnnnnnnnnnnnnnnnnnnnnnnnnnnnnnnnnnnnnnnnnnnnnnnnnnnnnnnnnnnnnnnnnnnnnnnnnnnnnnnnnnnnnnnnnnnnnnnnnnnnnnnnnnnnnnnnnnnnnnnnnnnnnnnnnnnnnnnnnnnnnnnnnnnnnnnnnnnnnnnnnnnnnnnnnnnnnnnnnnnnnnnnnnnnnnnnnnnnnnnnnnnnnnnnnnnnnnnnnnnnnnnnnnnnnnnnnnnnnnnnnnnnnnnnnnnnnnnnnnnnnnnnnnnnnnnnnnnnnnnnnnnnnnnnnnnnnnnnnnnnnnnnnnnnnnnnnnnnnnnnnnnnnnnnnnnnnnnnnnnnnnnnnnnnnnnnnnnnnnnnnnnnnnnnnnnnnnnnnnnnnnnnnnnnnnnnnnnnnnnnnnnnnnnnnnnnnnnnnnnnnnnnnnnnnnnnnnnnnnnnnnnnnnnnnnnnnnnnnnnnnnnnnnnnnnnnnnnnnnnnnnnnnnnnnnnnnnnnnnnnnnnnnnnnnnnnnnnnnnnnnnnnnnnnnnnnnnnnnnnnnnnnnnnnnnnnnnnnnnnnnnnnnnnnnnnnnnnnnnnnnnnnnnnnnnnnnnnnnnnnnnnnnnnnnnnnnnnnnnnnnnnnnnnnnnnnnnnnnnnnnnnnnnnnnnnnnnnnnnnnnnnnnnnnnnnnnnnnnnnnnnnnnnnnnnnnnnnnnnnnnnnnnnnnnnnnnnnnnnnnnnnnnnnnnnnnnnnnnnnnnnnnnnnnnnnnnnnnnnnnnnnnnnnnnnnnnnnnnnnnnnnnnnnnnnnnnnnnnnnnnnnnnnnnnnnnnnnnnnnnnnnnnnnnnnnnnnnnnnnnnnnnnnnnnnnnnnnnnnnnnnnnnnnnnnnnnnnnnnnnnnnnnnnnnnnnnnnnnnnnnnnnnnnnnnnnnnnnnnnnnnnnnnnnnnnnnnnnnnnnnnnnnnnnnnnnnnnnnnnnnnnnnnnnnnnnnnnnnnnnnnnnnnnnnnnnnnnnnnnnnnnnnnnnnnnnnnnnnnnnnnnnnnnnnnnnnnnnnnnnnnnnnnnnnnnnnnnnnnnnnnnnnnnnnnnnnnnnnnnnnnnnnnnnnnnnnnnnnnnnnnnnnnnnnnnnnnnnnnnnnnnnnnnnnnnnnnnnnnnnnnnnnnnnnnnnnnnnnnnnnnnnnnnnnnnnnnnnnnnnnnnnnnnnnnnnnnnnnnnnnnnnnnnnnnnnnnnnnnnnnnnnnnnnnnnnnnnnnnnnnnnnnnnnnnnnnnnnnnnnnnnnnnnnnnnnnnnnnnnnnnnnnnnnnnnnnnnnnnnnnnnnnnnnnnnnnnnnnnnnnnnnnnnnnnnnnnnnnnnnnnnnnnnnnnnnnnnnnnnnnnnnnnnnnnnnnnnnnnnnnnnnnnnnnnnnnnnnnnnnnnnnnnnnnnnnnnnnnnnnnnnnnnnnnnnnnnnnnnnnnnnnnnnnnnnnnnnnnnnnnnnnnnnnnnnnnnnnnnnnnnnnnnnnnnnnnnnnnnnnnnnnnnnnnnnnnnnnnnnnnnnnnnnnnnnnnnnnnnnnnnnnnnnnnnnnnnnnnnnnnnnnnnnnnnnnnnnnnnnnnnnnnnnnnnnnnnnnnnnnnnnnnnnnnnnnnnnnnnnnnnnnnnnnnnnnnnnnnnnnnnnnnnnnnnnnnnnnnnnnnnnnnnnnnnnnnnnnnnnnnnnnnnnnnnnnnnnnnnnnnnnnnnnnnnnnnnnnnnnnnnnnnnnnnnnnnnnnnnnnnnnnnnnnnnnnnnnnnnnnnnnnnnnnnnnnnnnnnnnnnnnnnnnnnnnnnnnnnnnnnnnnnnnnnnnnnnnnnnnnnnnnnnnnnnnnnnnnnnnnnnnnnnnnnnnnnnnnnnnnnnnnnnnnnnnnnnnnnnnnnnnnnnnnnnnnnnnnnnnnnnnnnnnnnnnnnnnnnnnnnnnnnnnnnnnnnnnnnnnnnnnnnnnnnnnnnnnnnnnnnnnnnnnnnnnnnnnnnnnnnnnnnnnnnnnnnnnnnnnnnnnnnnnnnnnnnnnnnnnnnnnnnnnnnnnnnnnnnnnnnnnnnnnnnnnnnnnnnnnnnnnnnnnnnnnnnnnnnnnnnnnnnnnnnnnnnnnnnnnnnnnnnnnnnnnnnnnnnnnnnnnnnnnnnnnnnnnnnnnnnnnnnnnnnnnnnnnnnnnnnnnnnnnnnnnnnnnnnnnnnnnnnnnnnnnnnnnnnnnnnnnnnnnnnnnnnnnnnnnnnnnnnnnnnnnnnnnnnnnnnnnnnnnnnnnnnnnnnnnnnnnnnnnnnnnnnnnnnnnnnnnnnnnnnnnnnnnnnnnnnnnnnnnnnnnnnnnnnnnnnnnnnnnnnnnnnnnnnnnnnnnnnnnnnnnnnnnnnnnnnnnnnnnnnnnnnnnnnnnnnnnnnnnnnnnnnnnnnnnnnnnnnnnnnnnnnnnnnnnnnnnnnnnnnnnnnnnnnnnnnnnnnnnnnnnnnnnnnnnnnnnnnnnnnnnnnnnnnnnnnnnnnnnnnnnnnnnnnnnnnnnnnnnnnnnnnnnnnnnnnnnnnnnnnnnnnnnnnnnnnnnnnnnnnnnnnnnnnnnnnnnnnnnnnnnnnnnnnnnnnnnnnnnnnnnnnnnnnnnnnnnnnnnnnnnnnnnnnnnnnnnnnnnnnnnnnnnnnnnnnnnnnnnnnnnnnnnnnnnnnnnnnnnnnnnnnnnnnnnnnnnnnnnnnnnnnnnnnnnnnnnnnnnnnnnnnnnnnnnnnnnnnnnnnnnnnnnnnnnnnnnnnnnnnnnnnnnnnnnnnnnnnnnnnnnnnnnnnnnnnnnnnnnnnnnnnnnnnnnnnnnnnnnnnnnnnnnnnnnnnnnnnnnnnnnnnnnnnnnnnnnnnnnnnnnnnnnnnnnnnnnnnnnnnnnnnnnnnnnnnnnnnnnnnnnnnnnnnnnnnnnnnnnnnnnnnnnnnnnnnnnnnnnnnnnnnnnnnnnnnnnnnnnnnnnnnnnnnnnnnnnnnnnnnnnnnnnnnnnnnnnnnnnnnnnnnnnnnnnnnnnnnnnnnnnnnnnnnnnnnnnnnnnnnnnnnnnnnnnnnnnnnnnnnnnnnnnnnnnnnnnnnnnnnnnnnnnnnnnnnnnnnnnnnnnnnnnnnnnnnnnnnnnnnnnnnnnnnnnnnnnnnnnnnnnnnnnnnnnnnnnnnnnnnnnnnnnnnnnnnnnnnnnnnnnnnnnnnnnnnnnnnnnnnnnnnnnnnnnnnnnnnnnnnnnnnnnnnnnnnnnnnnnnnnnnnnnnnnnnnnnnnnnnnnnnnnnnnnnnnnnnnnnnnnnnnnnnnnnnnnnnnnnnnnnnnnnnnnnnnnnnnnnnnnnnnnnnnnnnnnnnnnnnnnnnnnnnnnnnnnnnnnnnnnnnnnnnnnnnnnnnnnnnnnnnnnnnnnnnnnnnnnnnnnnnnnnnnnnnnnnnnnnnnnnnnnnnnnnnnnnnnnnnnnnnnnnnnnnnnnnnnnnnnnnnnnnnnnnnnnnnnnnnnnnnnnnnnnnnnnnnnnnnnnnnnnnnnnnnnnnnnnnnnnnnnnnnnnnnnnnnnnnnnnnnnnnnnnnnnnnnnnnnnnnnnnnnnnnnnnnnnnnnnnnnnnnnnnnnnnnnnnnnnnnnnnnnnnnnnnnnnnnnnnnnnnnnnnnnnnnnnnnnnnnnnnnnnnnnnnnnnnnnnnnnnnnnnnnnnnnnnnnnnnnnnnnnnnnnnnnnnnnnnnnnnnnnnnnnnnnnnnnnnnnnnnnnnnnnnnnnnnnnnnnnnnnnnnnnnnnnnnnnnnnnnnnnnnnnnnnnnnnnnnnnnnnnnnnnnnnnnnnnnnnnnnnnnnnnnnnnnnnnnnnnnnnnnnnnnnnnnnnnnnnnnnnnnnnnnnnnnnnnnnnnnnnnnnnnnnnnnnnnnnnnnnnnnnnnnnnnnnnnnnnnnnnnnnnnnnnnnnnnnnnnnnnnnnnnnnnnnnnnnnnnnnnnnnnnnnnnnnnnnnnnnnnnnnnnnnnnnnnnnnnnnnnnnnnnnnnnnnnnnnnnnnnnnnnnnnnnnnnnnnnnnnnnnnnnnnnnnnnnnnnnnnnnnnnnnnnnnnnnnnnnnnnnnnnnnnnnnnnnnnnnnnnnnnnnnnnnnnnnnnnnnnnnnnnnnnnnnnnnnnnnnnnnnnnnnnnnnnnnnnnnnnnnnnnnnnnnnnnnnnnnnnnnnnnnnnnnnnnnnnnnnnnnnnnnnnnnnnnnnnnnnnnnnnnnnnnnnnnnnnnnnnnnnnnnnnnnnnnnnnnnnnnnnnnnnnnnnnnnnnnnnnnnnnnnnnnnnnnnnnnnnnnnnnnnnnnnnnnnnnnnnnnnnnnnnnnnnnnnnnnnnnnnnnnnnnnnnnnnnnnnnnnnnnnnnnnnnnnnnnnnnnnnnnnnnnnnnnnnnnnnnnnnnnnnnnnnnnnnnnnnnnnnnnnnnnnnnnnnnnnnnnnnnnnnnnnnnnnnnnnnnnnnnnnnnnnnnnnnnnnnnnnnnnnnnnnnnnnnnnnnnnnnnnnnnnnnnnnnnnnnnnnnnnnnnnnnnnnnnnnnnnnnnnnnnnnnnnnnnnnnnnnnnnnnnnnnnnnnnnnnnnnnnnnnnnnnnnnnnnnnnnnnnnnnnnnnnnnnnnnnnnnnnnnnnnnnnnnnnnnnnnnnnnnnnnnnnnnnnnnnnnnnnnnnnnnnnnnnnnnnnnnnnnnnnnnnnnnnnnnnnnnnnnnnnnnnnnnnnnnnnnnnnnnnnnnnnnnnnnnnnnnnnnnnnnnnnnnnnnnnnnnnnnnnnnnnnnnnnnnnnnnnnnnnnnnnnnnnnnnnnnnnnnnnnnnnnnnnnnnnnnnnnnnnnnnnnnnnnnnnnnnnnnnnnnnnnnnnnnnnnnnnnnnnnnnnnnnnnnnnnnnnnnnnnnnnnnnnnnnnnnnnnnnnnnnnnnnnnnnnnnnnnnnnnnnnnnnnnnnnnnnnnnnnnnnnnnnnnnnnnnnnnnnnnnnnnnnnnnnnnnnnnnnnnnnnnnnnnnnnnnnnnnnnnnnnnnnnnnnnnnnnnnnnnnnnnnnnnnnnnnnnnnnnnnnnnnnnnnnnnnnnnnnnnnnnnnnnnnnnnnnnnnnnnnnnnnnnnnnnnnnnnnnnnnnnnnnnnnnnnnnnnnnnnnnnnnnnnnnnnnnnnnnnnnnnnnnnnnnnnnnnnnnnnnnnnnnnnnnnnnnnnnnnnnnnnnnnnnnnnnnnnnnnnnnnnnnnnnnnnnnnnnnnnnnnnnnnnnnnnnnnnnnnnnnnnnnnnnnnnnnnnnnnnnnnnnnnnnnnnnnnnnnnnnnnnnnnnnnnnnnnnnnnnnnnnnnnnnnnnnnnnnnnnnnnnnnnnnnnnnnnnnnnnnnnnnnnnnnnnnnnnnnnnnnnnnnnnnnnnnnnnnnnnnnnnnnnnnnnnnnnnnnnnnnnnnnnnnnnnnnnnnnnnnnnnnnnnnnnnnnnnnnnnnnnnnnnnnnnnnnnnnnnnnnnnnnnnnnnnnnnnnnnnnnnnnnnnnnnnnnnnnnnnnnnnnnnnnnnnnnnnnnnnnnnnnnnnnnnnnnnnnnnnnnnnnnnnnnnnnnnnnnnnnnnnnnnnnnnnnnnnnnnnnnnnnnnnnnnnnnnnnnnnnnnnnnnnnnnnnnnnnnnnnnnnnnnnnnnnnnnnnnnnnnnnnnnnnnnnnnnnnnnnnnnnnnnnnnnnnnnnnnnnnnnnnnnnnnnnnnnnnnnnnnnnnnnnnnnnnnnnnnnnnnnnnnnnnnnnnnnnnnnnnnnnnnnnnnnnnnnnnnnnnnnnnnnnnnnnnnnnnnnnnnnnnnnnnnnnnnnnnnnnnnnnnnnnnnnnnnnnnnnnnnnnnnnnnnnnnnnnnnnnnnnnnnnnnnnnnnnnnnnnnnnnnnnnnnnnnnnnnnnnnnnnnnnnnnnnnnnnnnnnnnnnnnnnnnnnnnnnnnnnnnnnnnnnnnnnnnnnnnnnnnnnnnnnnnnnnnnnnnnnnnnnnnnnnnnnnnnnnnnnnnnnnnnnnnnnnnnnnnnnnnnnnnnnnnnnnnnnnnnnnnnnnnnnnnnnnnnnnnnnnnnnnnnnnnnnnnnnnnnnnnnnnnnnnnnnnnnnnnnnnnnnnnnnnnnnnnnnnnnnnnnnnnnnnnnnnnnnnnnnnnnnnnnnnnnnnnnnnnnnnnnnnnnnnnnnnnnnnnnnnnnnnnnnnnnnnnnnnnnnnnnnnnnnnnnnnnnnnnnnnnnnnnnnnnnnnnnnnnnnnnnnnnnnnnnnnnnnnnnnnnnnnnnnnnnnnnnnnnnnnnnnnnnnnnnnnnnnnnnnnnnnnnnnnnnnnnnnnnnnnnnnnnnnnnnnnnnnnnnnnnnnnnnnnnnnnnnnnnnnnnnnnnnnnnnnnnnnnnnnnnnnnnnnnnnnnnnnnnnnnnnnnnnnnnnnnnnnnnnnnnnnnnnnnnnnnnnnnnnnnnnnnnnnnnnnnnnnnnnnnnnnnnnnnnnnnnnnnnnnnnnnnnnnnnnnnnnnnnnnnnnnnnnnnnnnnnnnnnnnnnnnnnnnnnnnnnnnnnnnnnnnnnnnnnnnnnnnnnnnnnnnnnnnnnnnnnnnnnnnnnnnnnnnnnnnnnnnnnnnnnnnnnnnnnnnnnnnnnnnnnnnnnnnnnnnnnnnnnnnnnnnnnnnnnnnnnnnnnnnnnnnnnnnnnnnnnnnnnnnnnnnnnnnnnnnnnnnnnnnnnnnnnnnnnnnnnnnnnnnnnnnnnnnnnnnnnnnnnnnnnnnnnnnnnnnnnnnnnnnnnnnnnnnnnnnnnnnnnnnnnnnnnnnnnnnnnnnnnnnnnnnnnnnnnnnnnnnnnnnnnnnnnnnnnnnnnnnnnnnnnnnnnnnnnnnnnnnnnnnnnnnnnnnnnnnnnnnnnnnnnnnnnnnnnnnnnnnnnnnnnnnnnnnnnnnnnnnnnnnnnnnnnnnnnnnnnnnnnnnnnnnnnnnnnnnnnnnnnnnnnnnnnnnnnnnnnnnnnnnnnnnnnnnnnnnnnnnnnnnnnnnnnnnnnnnnnnnnnnnnnnnnnnnnnnnnnnnnnnnnnnnnnnnnnnnnnnnnnnnnnnnnnnnnnnnnnnnnnnnnnnnnnnnnnnnnnnnnnnnnnnnnnnnnnnnnnnnnnnnnnnnnnnnnnnnnnnnnnnnnnnnnnnnnnnnnnnnnnnnnnnnnnnnnnnnnnnnnnnnnnnnnnnnnnnnnnnnnnnnnnnnnnnnnnnnnnnnnnnnnnnnnnnnnnnnnnnnnnnnnnnnnnnnnnnnnnnnnnnnnnnnnnnnnnnnnnnnnnnnnnnnnnnnnnnnnnnnnnnnnnnnnnnnnnnnnnnnnnnnnnnnnnnnnnnnnnnnnnnnnnnnnnnnnnnnnnnnnnnnnnnnnnnnnnnnnnnnnnnnnnnnnnnnnnnnnnnnnnnnnnnnnnnnnnnnnnnnnnnnnnnnnnnnnnnnnnnnnnnnnnnnnnnnnnnnnnnnnnnnnnnnnnnnnnnnnnnnnnnnnnnnnnnnnnnnnnnnnnnnnnnnnnnnnnnnnnnnnnnnnnnnnnnnnnnnnnnnnnnnnnnnnnnnnnnnnnnnnnnnnnnnnnnnnnnnnnnnnnnnnnnnnnnnnnnnnnnnnnnnnnnnnnnnnnnnnnnnnnnnnnnnnnnnnnnnnnnnnnnnnnnnnnnnnnnnnnnnnnnnnnnnnnnnnnnnnnnnnnnnnnnnnnnnnnnnnnnnnnnnnnnnnnnnnnnnnnnnnnnnnnnnnnnnnnnnnnnnnnnnnnnnnnnnnnnnnnnnnnnnnnnnnnnnnnnnnnnnnnnnnnnnnnnnnnnnnnnnnnnnnnnnnnnnnnnnnnnnnnnnnnnnnnnnnnnnnnnnnnnnnnnnnnnnnnnnnnnnnnnnnnnnnnnnnnnnnnnnnnnnnnnnnnnnnnnnnnnnnnnnnnnnnnnnnnnnnnnnnnnnnnnnnnnnnnnnnnnnnnnnnnnnnnnnnnnnnnnnnnnnnnnnnnnnnnnnnnnnnnnnnnnnnnnnnnnnnnnnnnnnnnnnnnnnnnnnnnnnnnnnnnnnnnnnnnnnnnnnnnnnnnnnnnnnnnnnnnnnnnnnnnnnnnnnnnnnnnnnnnnnnnnnnnnnnnnnnnnnnnnnnnnnnnnnnnnnnnnnnnnnnnnnnnnnnnnnnnnnnnnnnnnnnnnnnnnnnnnnnnnnnnnnnnnnnnnnnnnnnnnnnnnnnnnnnnnnnnnnnnnnnnnnnnnnnnnnnnnnnnnnnnnnnnnnnnnnnnnnnnnnnnnnnnnnnnnnnnnnnnnnnnnnnnnnnnnnnnnnnnnnnnnnnnnnnnnnnnnnnnnnnnnnnnnnnnnnnnnnnnnnnnnnnnnnnnnnnnnnnnnnnnnnnnnnnnnnnnnnnnnnnnnnnnnnnnnnnnnnnnnnnnnnnnnnnnnnnnnnnnnnnnnnnnnnnnnnnnnnnnnnnnnnnnnnnnnnnnnnnnnnnnnnnnnnnnnnnnnnnnnnnnnnnnnnnnnnnnnnnnnnnnnnnnnnnnnnnnnnnnnnnnnnnnnnnnnnnnnnnnnnnnnnnnnnnnnnnnnnnnnnnnnnnnnnnnnnnnnnnnnnnnnnnnnnnnnnnnnnnnnnnnnnnnnnnnnnnnnnnnnnnnnnnnnnnnnnnnnnnnnnnnnnnnnnnnnnnnnnnnnnnnnnnnnnnnnnnnnnnnnnnnnnnnnnnnnnnnnnnnnnnnnnnnnnnnnnnnnnnnnnnnnnnnnnnnnnnnnnnnnnnnnnnnnnnnnnnnnnnnnnnnnnnnnnnnnnnnnnnnnnnnnnnnnnnnnnnnnnnnnnnnnnnnnnnnnnnnnnnnnnnnnnnnnnnnnnnnnnnnnnnnnnnnnnnnnnnnnnnnnnnnnnnnnnnnnnnnnnnnnnnnnnnnnnnnnnnnnnnnnnnnnnnnnnnnnnnnnnnnnnnnnnnnnnnnnnnnnnnnnnnnnnnnnnnnnnnnnnnnnnnnnnnnnnnnnnnnnnnnnnnnnnnnnnnnnnnnnnnnnnnnnnnnnnnnnnnnnnnnnnnnnnnnnnnnnnnnnnnnnnnnnnnnnnnnnnnnnnnnnnnnnnnnnnnnnnnnnnnnnnnnnnnnnnnnnnnnnnnnnnnnnnnnnnnnnnnnnnnnnnnnnnnnnnnnnnnnnnnnnnnnnnnnnnnnnnnnnnnnnnnnnnnnnnnnnnnnnnnnnnnnnnnnnnnnnnnnnnnnnnnnnnnnnnnnnnnnnnnnnnnnnnnnnnnnnnnnnnnnnnnnnnnnnnnnnnnnnnnnnnnnnnnnnnnnnnnnnnnnnnnnnnnnnnnnnnnnnnnnnnnnnnnnnnnnnnnnnnnnnnnnnnnnnnnnnnnnnnnnnnnnnnnnnnnnnnnnnnnnnnnnnnnnnnnnnnnnnnnnnnnnnnnnnnnnnnnnnnnnnnnnnnnnnnnnnnnnnnnnnnnnnnnnnnnnnnnnnnnnnnnnnnnnnnnnnnnnnnnnnnnnnnnnnnnnnnnnnnnnnnnnnnnnnnnnnnnnnnnnnnnnnnnnnnnnnnnnnnnnnnnnnnnnnnnnnnnnnnnnnnnnnnnnnnnnnnnnnnnnnnnnnnnnnnnnnnnnnnnnnnnnnnnnnnnnnnnnnnnnnnnnnnnnnnnnnnnnnnnnnnnnnnnnnnnnnnnnnnnnnnnnnnnnnnnnnnnnnnnnnnnnnnnnnnnnnnnnnnnnnnnnnnnnnnnnnnnnnnnnnnnnnnnnnnnnnnnnnnnnnnnnnnnnnnnnnnnnnnnnnnnnnnnnnnnnnnnnnnnnnnnnnnnnnnnnnnnnnnnnnnnnnnnnnnnnnnnnnnnnnnnnnnnnnnnnnnnnnnnnnnnnnnnnnnnnnnnnnnnnnnnnnnnnnnnnnnnnnnnnnnnnnnnnnnnnnnnnnnnnnnnnnnnnnnnnnnnnnnnnnnnnnnnnnnnnnnnnnnnnnnnnnnnnnnnnnnnnnnnnnnnnnnnnnnnnnnnnnnnnnnnnnnnnnnnnnnnnnnnnnnnnnnnnnnnnnnnnnnnnnnnnnnnnnnnnnnnnnnnnnnnnnnnnnnnnnnnnnnnnnnnnnnnnnnnnnnnnnnnnnnnnnnnnnnnnnnnnnnnnnnnnnnnnnnnnnnnnnnnnnnnnnnnnnnnnnnnnnnnnnnnnnnnnnnnnnnnnnnnnnnnnnnnnnnnnnnnnnnnnnnnnnnnnnnnnnnnnnnnnnnnnnnnnnnnnnnnnnnnnnnnnnnnnnnnnnnnnnnnnnnnnnnnnnnnnnnnnnnnnnnnnnnnnnnnnnnnnnnnnnnnnnnnnnnnnnnnnnnnnnnnnnnnnnnnnnnnnnnnnnnnnnnnnnnnnnnnnnnnnnnnnnnnnnnnnnnnnnnnnnnnnnnnnnnnnnnnnnnnnnnnnnnnnnnnnnnnnnnnnnnnnnnnnnnnnnnnnnnnnnnnnnnnnnnnnnnnnnnnnnnnnnnnnnnnnnnnnnnnnnnnnnnnnnnnnnnnnnnnnnnnnnnnnnnnnnnnnnnnnnnnnnnnnnnnnnnnnnnnnnnnnnnnnnnnnnnnnnnnnnnnnnnnnnnnnnnnnnnnnnnnnnnnnnnnnnnnnnnnnnnnnnnnnnnnnnnnnnnnnnnnnnnnnnnnnnnnnnnnnnnnnnnnnnnnnnnnnnnnnnnnnnnnnnnnnnnnnnnnnnnnnnnnnnnnnnnnnnnnnnnnnnnnnnnnnnnnnnnnnnnnnnnnnnnnnnnnnnnnnnnnnnnnnnnnnnnnnnnnnnnnnnnnnnnnnnnnnnnnnnnnnnnnnnnnnnnnnnnnnnnnnnnnnnnnnnnnnnnnnnnnnnnnnnnnnnnnnnnnnnnnnnnnnnnnnnnnnnnnnnnnnnnnnnnnnnnnnnnnnnnnnnnnnnnnnnnnnnnnnnnnnnnnnnnnnnnnnnnnnnnnnnnnnnnnnnnnnnnnnnnnnnnnnnnnnnnnnnnnnnnnnnnnnnnnnnnnnnnnnnnnnnnnnnnnnnnnnnnnnnnnnnnnnnnnnnnnnnnnnnnnnnnnnnnnnnnnnnnnnnnnnnnnnnnnnnnnnnnnnnnnnnnnnnnnnnnnnnnnnnnnnnnnnnnnnnnnnnnnnnnnnnnnnnnnnnnnnnnnnnnnnnnnnnnnnnnnnnnnnnnnnnnnnnnnnnnnnnnnnnnnnnnnnnnnnnnnnnnnnnnnnnnnnnnnnnnnnnnnnnnnnnnnnnnnnnnnnnnnnnnnnnnnnnnnnnnnnnnnnnnnnnnnnnnnnnnnnnnnnnnnnnnnnnnnnnnnnnnnnnnnnnnnnnnnnnnnnnnnnnnnnnnnnnnnnnnnnnnnnnnnnnnnnnnnnnnnnnnnnnnnnnnnnnnnnnnnnnnnnnnnnnnnnnnnnnnnnnnnnnnnnnnnnnnnnnnnnnnnnnnnnnnnnnnnnnnnnnnnnnnnnnnnnnnnnnnnnnnnnnnnnnnnnnnnnnnnnnnnnnnnnnnnnnnnnnnnnnnnnnnnnnnnnnnnnnnnnnnnnnnnnnnnnnnnnnnnnnnnnnnnnnnnnnnnnnnnnnnnnnnnnnnnnnnnnnnnnnnnnnnnnnnnnnnnnnnnnnnnnnnnnnnnnnnnnnnnnnnnnnnnnnnnnnnnnnnnnnnnnnnnnnnnnnnnnnnnnnnnnnnnnnnnnnnnnnnnnnnnnnnnnnnnnnnnnnnnnnnnnnnnnnnnnnnnnnnnnnnnnnnnnnnnnnnnnnnnnnnnnnnnnnnnnnnnnnnnnnnnnnnnnnnnnnnnnnnnnnnnnnnnnnnnnnnnnnnnnnnnnnnnnnnnnnnnnnnnnnnnnnnnnnnnnnnnnnnnnnnnnnnnnnnnnnnnnnnnnnnnnnnnnnnnnnnnnnnnnnnnnnnnnnnnnnnnnnnnnnnnnnnnnnnnnnnnnnnnnnnnnnnnnnnnnnnnnnnnnnnnnnnnnnnnnnnnnnnnnnnnnnnnnnnnnnnnnnnnnnnnnnnnnnnnnnnnnnnnnnnnnnnnnnnnnnnnnnnnnnnnnnnnnnnnnnnnnnnnnnnnnnnnnnnnnnnnnnnnnnnnnnnnnnnnnnnnnnnnnnnnnnnnnnnnnnnnnnnnnnnnnnnnnnnnnnnnnnnnnnnnnnnnnnnnnnnnnnnnnnnnnnnnnnnnnnnnnnnnnnnnnnnnnnnnnnnnnnnnnnnnnnnnnnnnnnnnnnnnnnnnnnnnnnnnnnnnnnnnnnnnnnnnnnnnnnnnnnnnnnnnnnnnnnnnnnnnnnnnnnnnnnnnnnnnnnnnnnnnnnnnnnnnnnnnnnnnnnnnnnnnnnnnnnnnnnnnnnnnnnnnnnnnnnnnnnnnnnnnnnnnnnnnnnnnnnnnnnnnnnnnnnnnnnnnnnnnnnnnnnnnnnnnnnnnnnnnnnnnnnnnnnnnnnnnnnnnnnnnnnnnnnnnnnnnnnnnnnnnnnnnnnnnnnnnnnnnnnnnnnnnnnnnnnnnnnnnnnnnnnnnnnnnnnnnnnnnnnnnnnnnnnnnnnnnnnnnnnnnnnnnnnnnnnnnnnnnnnnnnnnnnnnnnnnnnnnnnnnnnnnnnnnnnnnnnnnnnnnnnnnnnnnnnnnnnnnnnnnnnnnnnnnnnnnnnnnnnnnnnnnnnnnnnnnnnnnnnnnnnnnnnnnnnnnnnnnnnnnnnnnnnnnnnnnnnnnnnnnnnnnnnnnnnnnnnnnnnnnnnnnnnnnnnnnnnnnnnnnnnnnnnnnnnnnnnnnnnnnnnnnnnnnnnnnnnnnnnnnnnnnnnnnnnnnnnnnnnnnnnnnnnnnnnnnnnnnnnnnnnnnnnnnnnnnnnnnnnnnnnnnnnnnnnnnnnnnnnnnnnnnnnnnnnnnnnnnnnnnnnnnnnnnnnnnnnnnnnnnnnnnnnnnnnnnnnnnnnnnnnnnnnnnnnnnnnnnnnnnnnnnnnnnnnnnnnnnnnnnnnnnnnnnnnnnnnnnnnnnnnnnnnnnnnnnnnnnnnnnnnnnnnnnnnnnnnnnnnnnnnnnnnnnnnnnnnnnnnnnnnnnnnnnnnnnnnnnnnnnnnnnnnnnnnnnnnnnnnnnnnnnnnnnnnnnnnnnnnnnnnnnnnnnnnnnnnnnnnnnnnnnnnnnnnnnnnnnnnnnnnnnnnnnnnnnnnnnnnnnnnnnnnnnnnnnnnnnnnnnnnnnnnnnnnnnnnnnnnnnnnnnnnnnnnnnnnnnnnnnnnnnnnnnnnnnnnnnnnnnnnnnnnnnnnnnnnnnnnnnnnnnnnnnnnnnnnnnnnnnnnnnnnnnnnnnnnnnnnnnnnnnnnnnnnnnnnnnnnnnnnnnnnnnnnnnnnnnnnnnnnnnnnnnnnnnnnnnnnnnnnnnnnnnnnnnnnnnnnnnnnnnnnnnnnnnnnnnnnnnnnnnnnnnnnnnnnnnnnnnnnnnnnnnnnnnnnnnnnnnnnnnnnnnnnnnnnnnnnnnnnnnnnnnnnnnnnnnnnnnnnnnnnnnnnnnnnnnnnnnnnnnnnnnnnnnnnnnnnnnnnnnnnnnnnnnnnnnnnnnnnnnnnnnnnnnnnnnnnnnnnnnnnnnnnnnnnnnnnnnnnnnnnnnnnnnnnnnnnnnnnnnnnnnnnnnnnnnnnnnnnnnnnnnnnnnnnnnnnnnnnnnnnnnnnnnnnnnnnnnnnnnnnnnnnnnnnnnnnnnnnnnnnnnnnnnnnnnnnnnnnnnnnnnnnnnnnnnnnnnnnnnnnnnnnnnnnnnnnnnnnnnnnnnnnnnnnnnnnnnnnnnnnnnnnnnnnnnnnnnnnnnnnnnnnnnnnnnnnnnnnnnnnnnnnnnnnnnnnnnnnnnnnnnnnnnnnnnnnnnnnnnnnnnnnnnnnnnnnnnnnnnnnnnnnnnnnnnnnnnnnnnnnnnnnnnnnnnnnnnnnnnnnnnnnnnnnnnnnnnnnnnnnnnnnnnnnnnnnnnnnnnnnnnnnnnnnnnnnnnnnnnnnnnnnnnnnnnnnnnnnnnnnnnnnnnnnnnnnnnnnnnnnnnnnnnnnnnnnnnnnnnnnnnnnnnnnnnnnnnnnnnnnnnnnnnnnnnnnnnnnnnnnnnnnnnnnnnnnnnnnnnnnnnnnnnnnnnnnnnnnnnnnnnnnnnnnnnnnnnnnnnnnnnnnnnnnnnnnnnnnnnnnnnnnnnnnnnnnnnnnnnnnnnnnnnnnnnnnnnnnnnnnnnnnnnnnnnnnnnnnnnnnnnnnnnnnnnnnnnnnnnnnnnnnnnnnnnnnnnnnnnnnnnnnnnnnnnnnnnnnnnnnnnnnnnnnnnnnnnnnnnnnnnnnnnnnnnnnnnnnnnnnnnnnnnnnnnnnnnnnnnnnnnnnnnnnnnnnnnnnnnnnnnnnnnnnnnnnnnnnnnnnnnnnnnnnnnnnnnnnnnnnnnnnnnnnnnnnnnnnnnnnnnnnnnnnnnnnnnnnnnnnnnnnnnnnnnnnnnnnnnnnnnnnnnnnnnnnnnnnnnnnnnnnnnnnnnnnnnnnnnnnnnnnnnnnnnnnnnnnnnnnnnnnnnnnnnnnnnnnnnnnnnnnnnnnnnnnnnnnnnnnnnnnnnnnnnnnnnnnnnnnnnnnnnnnnnnnnnnnnnnnnnnnnnnnnnnnnnnnnnnnnnnnnnnnnnnnnnnnnnnnnnnnnnnnnnnnnnnnnnnnnnnnnnnnnnnnnnnnnnnnnnnnnnnnnnnnnnnnnnnnnnnnnnnnnnnnnnnnnnnnnnnnnnnnnnnnnnnnnnnnnnnnnnnnnnnnnnnnnnnnnnnnnnnnnnnnnnnnnnnnnnnnnnnnnnnnnnnnnnnnnnnnnnnnnnnnnnnnnnnnnnnnnnnnnnnnnnnnnnnnnnnnnnnnnnnnnnnnnnnnnnnnnnnnnnnnnnnnnnnnnnnnnnnnnnnnnnnnnnnnnnnnnnnnnnnnnnnnnnnnnnnnnnnnnnnnnnnnnnnnnnnnnnnnnnnnnnnnnnnnnnnnnnnnnnnnnnnnnnnnnnnnnnnnnnnnnnnnnnnnnnnnnnnnnnnnnnnnnnnnnnnnnnnnnnnnnnnnnnnnnnnnnnnnnnnnnnnnnnnnnnnnnnnnnnnnnnnnnnnnnnnnnnnnnnnnnnnnnnnnnnnnnnnnnnnnnnnnnnnnnnnnnnnnnnnnnnnnnnnnnnnnnnnnnnnnnnnnnnnnnnnnnnnnnnnnnnnnnnnnnnnnnnnnnnnnnnnnnnnnnnnnnnnnnnnnnnnnnnnnnnnnnnnnnnnnnnnnnnnnnnnnnnnnnnnnnnnnnnnnnnnnnnnnnnnnnnnnnnnnnnnnnnnnnnnnnnnnnnnnnnnnnnnnnnnnnnnnnnnnnnnnnnnnnnnnnnnnnnnnnnnnnnnnnnnnnnnnnnnnnnnnnnnnnnnnnnnnnnnnnnnnnnnnnnnnnnnnnnnnnnnnnnnnnnnnnnnnnnnnnnnnnnnnnnnnnnnnnnnnnnnnnnnnnnnnnnnnnnnnnnnnnnnnnnnnnnnnnnnnnnnnnnnnnnnnnnnnnnnnnnnnnnnnnnnnnnnnnnnnnnnnnnnnnnnnnnnnnnnnnnnnnnnnnnnnnnnnnnnnnnnnnnnnnnnnnnnnnnnnnnnnnnnnnnnnnnnnnnnnnnnnnnnnnnnnnnnnnnnnnnnnnnnnnnnnnnnnnnnnnnnnnnnnnnnnnnnnnnnnnnnnnnnnnnnnnnnnnnnnnnnnnnnnnnnnnnnnnnnnnnnnnnnnnnnnnnnnnnnnnnnnnnnnnnnnnnnnnnnnnnnnnnnnnnnnnnnnnnnnnnnnnnnnnnnnnnnnnnnnnnnnnnnnnnnnnnnnnnnnnnnnnnnnnnnnnnnnnnnnnnnnnnnnnnnnnnnnnnnnnnnnnnnnnnnnnnnnnnnnnnnnnnnnnnnnnnnnnnnnnnnnnnnnnnnnnnnnnnnnnnnnnnnnnnnnnnnnnnnnnnnnnnnnnnnnnnnnnnnnnnnnnnnnnnnnnnnnnnnnnnnnnnnnnnnnnnnnnnnnnnnnnnnnnnnnnnnnnnnnnnnnnnnnnnnnnnnnnnnnnnnnnnnnnnnnnnnnnnnnnnnnnnnnnnnnnnnnnnnnnnnnnnnnnnnnnnnnnnnnnnnnnnnnnnnnnnnnnnnnnnnnnnnnnnnnnnnnnnnnnnnnnnnnnnnnnnnnnnnnnnnnnnnnnnnnnnnnnnnnnnnnnnnnnnnnnnnnnnnnnnnnnnnnnnnnnnnnnnnnnnnnnnnnnnnnnnnnnnnnnnnnnnnnnnnnnnnnnnnnnnnnnnnnnnnnnnnnnnnnnnnnnnnnnnnnnnnnnnnnnnnnnnnnnnnnnnnnnnnnnnnnnnnnnnnnnnnnnnnnnnnnnnnnnnnnnnnnnnnnnnnnnnnnnnnnnnnnnnnnnnnnnnnnnnnnnnnnnnnnnnnnnnnnnnnnnnnnnnnnnnnnnnnnnnnnnnnnnnnnnnnnnnnnnnnnnnnnnnnnnnnnnnnnnnnnnnnnnnnnnnnnnnnnnnnnnnnnnnnnnnnnnnnnnnnnnnnnnnnnnnnnnnnnnnnnnnnnnnnnnnnnnnnnnnnnnnnnnnnnnnnnnnnnnnnnnnnnnnnnnnnnnnnnnnnnnnnnnnnnnnnnnnnnnnnnnnnnnnnnnnnnnnnnnnnnnnnnnnnnnnnnnnnnnnnnnnnnnnnnnnnnnnnnnnnnnnnnnnnnnnnnnnnnnnnnnnnnnnnnnnnnnnnnnnnnnnnnnnnnnnnnnnnnnnnnnnnnnnnnnnnnnnnnnnnnnnnnnnnnnnnnnnnnnnnnnnnnnnnnnnnnnnnnnnnnnnnnnnnnnnnnnnnnnnnnnnnnnnnnnnnnnnnnnnnnnnnnnnnnnnnnnnnnnnnnnnnnnnnnnnnnnnnnnnnnnnnnnnnnnnnnnnnnnnnnnnnnnnnnnnnnnnnnnnnnnnnnnnnnnnnnnnnnnnnnnnnnnnnnnnnnnnnnnnnnnnnnnnnnnnnnnnnnnnnnnnnnnnnnnnnnnnnnnnnnnnnnnnnnnnnnnnnnnnnnnnnnnnnnnnnnnnnnnnnnnnnnnnnnnnnnnnnnnnnnnnnnnnnnnnnnnnnnnnnnnnnnnnnnnnnnnnnnnnnnnnnnnnnnnnnnnnnnnnnnnnnnnnnnnnnnnnnnnnnnnnnnnnnnnnnnnnnnnnnnnnnnnnnnnnnnnnnnnnnnnnnnnnnnnnnnnnnnnnnnnnnnnnnnnnnnnnnnnnnnnnnnnnnnnnnnnnnnnnnnnnnnnnnnnnnnnnnnnnnnnnnnnnnnnnnnnnnnnnnnnnnnnnnnnnnnnnnnnnnnnnnnnnnnnnnnnnnnnnnnnnnnnnnnnnnnnnnnnnnnnnnnnnnnnnnnnnnnnnnnnnnnnnnnnnnnnnnnnnnnnnnnnnnnnnnnnnnnnnnnnnnnnnnnnnnnnnnnnnnnnnnnnnnnnnnnnnnnnnnnnnnnnnnnnnnnnnnnnnnnnnnnnnnnnnnnnnnnnnnnnnnnnnnnnnnnnnnnnnnnnnnnnnnnnnnnnnnnnnnnnnnnnnnnnnnnnnnnnnnnnnnnnnnnnnnnnnnnnnnnnnnnnnnnnnnnnnnnnnnnnnnnnnnnnnnnnnnnnnnnnnnnnnnnnnnnnnnnnnnnnnnnnnnnnnnnnnnnnnnnnnnnnnnnnnnnnnnnnnnnnnnnnnnnnnnnnnnnnnnnnnnnnnnnnnnnnnnnnnnnnnnnnnnnnnnnnnnnnnnnnnnnnnnnnnnnnnnnnnnnnnnnnnnnnnnnnnnnnnnnnnnnnnnnnnnnnnnnnnnnnnnnnnnnnnnnnnnnnnnnnnnnnnnnnnnnnnnnnnnnnnnnnnnnnnnnnnnnnnnnnnnnnnnnnnnnnnnnnnnnnnnnnnnnnnnnnnnnnnnnnnnnnnnnnnnnnnnnnnnnnnnnnnnnnnnnnnnnnnnnnnnnnnnnnnnnnnnnnnnnnnnnnnnnnnnnnnnnnnnnnnnnnnnnnnnnnnnnnnnnnnnnnnnnnnnnnnnnnnnnnnnnnnnnnnnnnnnnnnnnnnnnnnnnnnnnnnnnnnnnnnnnnnnnnnnnnnnnnnnnnnnnnnnnnnnnnnnnnnnnnnnnnnnnnnnnnnnnnnnnnnnnnnnnnnnnnnnnnnnnnnnnnnnnnnnnnnnnnnnnnnnnnnnnnnnnnnnnnnnnnnnnnnnnnnnnnnnnnnnnnnnnnnnnnnnnnnnnnnnnnnnnnnnnnnnnnnnnnnnnnnnnnnnnnnnnnnnnnnnnnnnnnnnnnnnnnnnnnnnnnnnnnnnnnnnnnnnnnnnnnnnnnnnnnnnnnnnnnnnnnnnnnnnnnnnnnnnnnnnnnnnnnnnnnnnnnnnnnnnnnnnnnnnnnnnnnnnnnnnnnnnnnnnnnnnnnnnnnnnnnnnnnnnnnnnnnnnnnnnnnnnnnnnnnnnnnnnnnnnnnnnnnnnnnnnnnnnnnnnnnnnnnnnnnnnnnnnnnnnnnnnnnnnnnnnnnnnnnnnnnnnnnnnnnnnnnnnnnnnnnnnnnnnnnnnnnnnnnnnnnnnnnnnnnnnnnnnnnnnnnnnnnnnnnnnnnnnnnnnnnnnnnnnnnnnnnnnnnnnnnnnnnnnnnnnnnnnnnnnnnnnnnnnnnnnnnnnnnnnnnnnnnnnnnnnnnnnnnnnnnnnnnnnnnnnnnnnnnnnnnnnnnnnnnnnnnnnnnnnnnnnnnnnnnnnnnnnnnnnnnnnnnnnnnnnnnnnnnnnnnnnnnnnnnnnnnnnnnnnnnnnnnnnnnnnnnnnnnnnnnnnnnnnnnnnnnnnnnnnnnnnnnnnnnnnnnnnnnnnnnnnnnnnnnnnnnnnnnnnnnnnnnnnnnnnnnnnnnnnnnnnnnnnnnnnnnnnnnnnnnnnnnnnnnnnnnnnnnnnnnnnnnnnnnnnnnnnnnnnnnnnnnnnnnnnnnnnnnnnnnnnnnnnnnnnnnnnnnnnnnnnnnnnnnnnnnnnnnnnnnnnnnnnnnnnnnnnnnnnnnnnnnnnnnnnnnnnnnnnnnnnnnnnnnnnnnnnnnnnnnnnnnnnnnnnnnnnnnnnnnnnnnnnnnnnnnnnnnnnnnnnnnnnnnnnnnnnnnnnnnnnnnnnnnnnnnnnnnnnnnnnnnnnnnnnnnnnnnnnnnnnnnnnnnnnnnnnnnnnnnnnnnnnnnnnnnnnnnnnnnnnnnnnnnnnnnnnnnnnnnnnnnnnnnnnnnnnnnnnnnnnnnnnnnnnnnnnnnnnnnnnnnnnnnnnnnnnnnnnnnnnnnnnnnnnnnnnnnnnnnnnnnnnnnnnnnnnnnnnnnnnnnnnnnnnnnnnnnnnnnnnnnnnnnnnnnnnnnnnnnnnnnnnnnnnnnnnnnnnnnnnnnnnnnnnnnnnnnnnnnnnnnnnnnnnnnnnnnnnnnnnnnnnnnnnnnnnnnnnnnnnnnnnnnnnnnnnnnnnnnnnnnnnnnnnnnnnnnnnnnnnnnnnnnnnnnnnnnnnnnnnnnnnnnnnnnnnnnnnnnnnnnnnnnnnnnnnnnnnnnnnnnnnnnnnnnnnnnnnnnnnnnnnnnnnnnnnnnnnnnnnnnnnnnnnnnnnnnnnnnnnnnnnnnnnnnnnnnnnnnnnnnnnnnnnnnnnnnnnnnnnnnnnnnnnnnnnnnnnnnnnnnnnnnnnnnnnnnnnnnnnnnnnnnnnnnnnnnnnnnnnnnnnnnnnnnnnnnnnnnnnnnnnnnnnnnnnnnnnnnnnnnnnnnnnnnnnnnnnnnnnnnnnnnnnnnnnnnnnnnnnnnnnnnnnnnnnnnnnnnnnnnnnnnnnnnnnnnnnnnnnnnnnnnnnnnnnnnnnnnnnnnnnnnnnnnnnnnnnnnnnnnnnnnnnnnnnnnnnnnnnnnnnnnnnnnnnnnnnnnnnnnnnnnnnnnnnnnnnnnnnnnnnnnnnnnnnnnnnnnnnnnnnnnnnnnnnnnnnnnnnnnnnnnnnnnnnnnnnnnnnnnnnnnnnnnnnnnnnnnnnnnnnnnnnnnnnnnnnnnnnnnnnnnnnnnnnnnnnnnnnnnnnnnnnnnnnnnnnnnnnnnnnnnnnnnnnnnnnnnnnnnnnnnnnnnnnnnnnnnnnnnnnnnnnnnnnnnnnnnnnnnnnnnnnnnnnnnnnnnnnnnnnnnnnnnnnnnnnnnnnnnnnnnnnnnnnnnnnnnnnnnnnnnnnnnnnnnnnnnnnnnnnnnnnnnnnnnnnnnnnnnnnnnnnnnnnnnnnnnnnnnnnnnnnnnnnnnnnnnnnnnnnnnnnnnnnnnnnnnnnnnnnnnnnnnnnnnnnnnnnnnnnnnnnnnnnnnnnnnnnnnnnnnnnnnnnnnnnnnnnnnnnnnnnnnnnnnnnnnnnnnnnnnnnnnnnnnnnnnnnnnnnnnnnnnnnnnnnnnnnnnnnnnnnnnnnnnnnnnnnnnnnnnnnnnnnnnnnnnnnnnnnnnnnnnnnnnnnnnnnnnnnnnnnnnnnnnnnnnnnnnnnnnnnnnnnnnnnnnnnnnnnnnnnnnnnnnnnnnnnnnnnnnnnnnnnnnnnnnnnnnnnnnnnnnnnnnnnnnnnnnnnnnnnnnnnnnnnnnnnnnnnnnnnnnnnnnnnnnnnnnnnnnnnnnnnnnnnnnnnnnnnnnnnnnnnnnnnnnnnnnnnnnnnnnnnnnnnnnnnnnnnnnnnnnnnnnnnnnnnnnnnnnnnnnnnnnnnnnnnnnnnnnnnnnnnnnnnnnnnnnnnnnnnnnnnnnnnnnnnnnnnnnnnnnnnnnnnnnnnnnnnnnnnnnnnnnnnnnnnnnnnnnnnnnnnnnnnnnnnnnnnnnnnnnnnnnnnnnnnnnnnnnnnnnnnnnnnnnnnnnnnnnnnnnnnnnnnnnnnnnnnnnnnnnnnnnnnnnnnnnnnnnnnnnnnnnnnnnnnnnnnnnnnnnnnnnnnnnnnnnnnnnnnnnnnnnnnnnnnnnnnnnnnnnnnnnnnnnnnnnnnnnnnnnnnnnnnnnnnnnnnnnnnnnnnnnnnnnnnnnnnnnnnnnnnnnnnnnnnnnnnnnnnnnnnnnnnnnnnnnnnnnnnnnnnnnnnnnnnnnnnnnnnnnnnnnnnnnnnnnnnnnnnnnnnnnnnnnnnnnnnnnnnnnnnnnnnnnnnnnnnnnnnnnnnnnnnnnnnnnnnnnnnnnnnnnnnnnnnnnnnnnnnnnnnnnnnnnnnnnnnnnnnnnnnnnnnnnnnnnnnnnnnnnnnnnnnnnnnnnnnnnnnnnnnnnnnnnnnnnnnnnnnnnnnnnnnnnnnnnnnnnnnnnnnnnnnnnnnnnnnnnnnnnnnnnnnnnnnnnnnnnnnnnnnnnnnnnnnnnnnnnnnnnnnnnnnnnnnnnnnnnnnnnnnnnnnnnnnnnnnnnnnnnnnnnnnnnnnnnnnnnnnnnnnnnnnnnnnnnnnnnnnnnnnnnnnnnnnnnnnnnnnnnnnnnnnnnnnnnnnnnnnnnnnnnnnnnnnnnnnnnnnnnnnnnnnnnnnnnnnnnnnnnnnnnnnnnnnnnnnnnnnnnnnnnnnnnnnnnnnnnnnnnnnnnnnnnnnnnnnnnnnnnnnnnnnnnnnnnnnnnnnnnnnnnnnnnnnnnnnnnnnnnnnnnnnnnnnnnnnnnnnnnnnnnnnnnnnnnnnnnnnnnnnnnnnnnnnnnnnnnnnnnnnnnnnnnnnnnnnnnnnnnnnnnnnnnnnnnnnnnnnnnnnnnnnnnnnnnnnnnnnnnnnnnnnnnnnnnnnnnnnnnnnnnnnnnnnnnnnnnnnnnnnnnnnnnnnnnnnnnnnnnnnnnnnnnnnnnnnnnnnnnnnnnnnnnnnnnnnnnnnnnnnnnnnnnnnnnnnnnnnnnnnnnnnnnnnnnnnnnnnnnnnnnnnnnnnnnnnnnnnnnnnnnnnnnnnnnnnnnnnnnnnnnnnnnnnnnnnnnnnnnnnnnnnnnnnnnnnnnnnnnnnnnnnnnnnnnnnnnnnnnnnnnnnnnnnnnnnnnnnnnnnnnnnnnnnnnnnnnnnnnnnnnnnnnnnnnnnnnnnnnnnnnnnnnnnnnnnnnnnnnnnnnnnnnnnnnnnnnnnnnnnnnnnnnnnnnnnnnnnnnnnnnnnnnnnnnnnnnnnnnnnnnnnnnnnnnnnnnnnnnnnnnnnnnnnnnnnnnnnnnnnnnnnnnnnnnnnnnnnnnnnnnnnnnnnnnnnnnnnnnnnnnnnnnnnnnnnnnnnnnnnnnnnnnnnnnnnnnnnnnnnnnnnnnnnnnnnnnnnnnnnnnnnnnnnnnnnnnnnnnnnnnnnnnnnnnnnnnnnnnnnnnnnnnnnnnnnnnnnnnnnnnnnnnnnnnnnnnnnnnnnnnnnnnnnnnnnnnnnnnnnnnnnnnnnnnnnnnnnnnnnnnnnnnnnnnnnnnnnnnnnnnnnnnnnnnnnnnnnnnnnnnnnnnnnnnnnnnnnnnnnnnnnnnnnnnnnnnnnnnnnnnnnnnnnnnnnnnnnnnnnnnnnnnnnnnnnnnnnnnnnnnnnnnnnnnnnnnnnnnnnnnnnnnnnnnnnnnnnnnnnnnnnnnnnnnnnnnnnnnnnnnnnnnnnnnnnnnnnnnnnnnnnnnnnnnnnnnnnnnnnnnnnnnnnnnnnnnnnnnnnnnnnnnnnnnnnnnnnnnnnnnnnnnnnnnnnnnnnnnnnnnnnnnnnnnnnnnnnnnnnnnnnnnnnnnnnnnnnnnnnnnnnnnnnnnnnnnnnnnnnnnnnnnnnnnnnnnnnnnnnnnnnnnnnnnnnnnnnnnnnnnnnnnnnnnnnnnnnnnnnnnnnnnnnnnnnnnnnnnnnnnnnnnnnnnnnnnnnnnnnnnnnnnnnnnnnnnnnnnnnnnnnnnnnnnnnnnnnnnnnnnnnnnnnnnnnnnnnnnnnnnnnnnnnnnnnnnnnnnnnnnnnnnnnnnnnnnnnnnnnnnnnnnnnnnnnnnnnnnnnnnnnnnnnnnnnnnnnnnnnnnnnnnnnnnnnnnnnnnnnnnnnnnnnnnnnnnnnnnnnnnnnnnnnnnnnnnnnnnnnnnnnnnnnnnnnnnnnnnnnnnnnnnnnnnnnnnnnnnnnnnnnnnnnnnnnnnnnnnnnnnnnnnnnnnnnnnnnnnnnnnnnnnnnnnnnnnnnnnnnnnnnnnnnnnnnnnnnnnnnnnnnnnnnnnnnnnnnnnnnnnnnnnnnnnnnnnnnnnnnnnnnnnnnnnnnnnnnnnnnnnnnnnnnnnnnnnnnnnnnnnnnnnnnnnnnnnnnnnnnnnnnnnnnnnnnnnnnnnnnnnnnnnnnnnnnnnnnnnnnnnnnnnnnnnnnnnnnnnnnnnnnnnnnnnnnnnnnnnnnnnnnnnnnnnnnnnnnnnnnnnnnnnnnnnnnnnnnnnnnnnnnnnnnnnnnnnnnnnnnnnnnnnnnnnnnnnnnnnnnnnnnnnnnnnnnnnnnnnnnnnnnnnnnnnnnnnnnnnnnnnnnnnnnnnnnnnnnnnnnnnnnnnnnnnnnnnnnnnnnnnnnnnnnnnnnnnnnnnnnnnnnnnnnnnnnnnnnnnnnnnnnnnnnnnnnnnnnnnnnnnnnnnnnnnnnnnnnnnnnnnnnnnnnnnnnnnnnnnnnnnnnnnnnnnnnnnnnnnnnnnnnnnnnnnnnnnnnnnnnnnnnnnnnnnnnnnnnnnnnnnnnnnnnnnnnnnnnnnnnnnnnnnnnnnnnnnnnnnnnnnnnnnnnnnnnnnnnnnnnnnnnnnnnnnnnnnnnnnnnnnnnnnnnnnnnnnnnnnnnnnnnnnnnnnnnnnnnnnnnnnnnnnnnnnnnnnnnnnnnnnnnnnnnnnnnnnnnnnnnnnnnnnnnnnnnnnnnnnnnnnnnnnnnnnnnnnnnnnnnnnnnnnnnnnnnnnnnnnnnnnnnnnnnnnnnnnnnnnnnnnnnnnnnnnnnnnnnnnnnnnnnnnnnnnnnnnnnnnnnnnnnnnnnnnnnnnnnnnnnnnnnnnnnnnnnnnnnnnnnnnnnnnnnnnnnnnnnnnnnnnnnnnnnnnnnnnnnnnnnnnnnnnnnnnnnnnnnnnnnnnnnnnnnnnnnnnnnnnnnnnnnnnnnnnnnnnnnnnnnnnnnnnnnnnnnnnnnnnnnnnnnnnnnnnnnnnnnnnnnnnnnnnnnnnnnnnnnnnnnnnnnnnnnnnnnnnnnnnnnnnnnnnnnnnnnnnnnnnnnnnnnnnnnnnnnnnnnnnnnnnnnnnnnnnnnnnnnnnnnnnnnnnnnnnnnnnnnnnnnnnnnnnnnnnnnnnnnnnnnnnnnnnnnnnnnnnnnnnnnnnnnnnnnnnnnnnnnnnnnnnnnnnnnnnnnnnnnnnnnnnnnnnnnnnnnnnnnnnnnnnnnnnnnnnnnnnnnnnnnnnnnnnnnnnnnnnnnnnnnnnnnnnnnnnnnnnnnnnnnnnnnnnnnnnnnnnnnnnnnnnnnnnnnnnnnnnnnnnnnnnnnnnnnnnnnnnnnnnnnnnnnnnnnnnnnnnnnnnnnnnnnnnnnnnnnnnnnnnnnnnnnnnnnnnnnnnnnnnnnnnnnnnnnnnnnnnnnnnnnnnnnnnnnnnnnnnnnnnnnnnnnnnnnnnnnnnnnnnnnnnnnnnnnnnnnnnnnnnnnnnnnnnnnnnnnnnnnnnnnnnnnnnnnnnnnnnnnnnnnnnnnnnnnnnnnnnnnnnnnnnnnnnnnnnnnnnnnnnnnnnnnnnnnnnnnnnnnnnnnnnnnnnnnnnnnnnnnnnnnnnnnnnnnnnnnnnnnnnnnnnnnnnnnnnnnnnnnnnnnnnnnnnnnnnnnnnnnnnnnnnnnnnnnnnnnnnnnnnnnnnnnnnnnnnnnnnnnnnnnnnnnnnnnnnnnnnnnnnnnnnnnnnnnnnnnnnnnnnnnnnnnnnnnnnnnnnnnnnnnnnnnnnnnnnnnnnnnnnnnnnnnnnnnnnnnnnnnnnnnnnnnnnnnnnnnnnnnnnnnnnnnnnnnnnnnnnnnnnnnnnnnnnnnnnnnnnnnnnnnnnnnnnnnnnnnnnnnnnnnnnnnnnnnnnnnnnnnnnnnnnnnnnnnnnnnnnnnnnnnnnnnnnnnnnnnnnnnnnnnnnnnnnnnnnnnnnnnnnnnnnnnnnnnnnnnnnnnnnnnnnnnnnnnnnnnnnnnnnnnnnnnnnnnnnnnnnnnnnnnnnnnnnnnnnnnnnnnnnnnnnnnnnnnnnnnnnnnnnnnnnnnnnnnnnnnnnnnnnnnnnnnnnnnnnnnnnnnnnnnnnnnnnnnnnnnnnnnnnnnnnnnnnnnnnnnnnnnnnnnnnnnnnnnnnnnnnnnnnnnnnnnnnnnnnnnnnnnnnnnnnnnnnnnnnnnnnnnnnnnnnnnnnnnnnnnnnnnnnnnnnnnnnnnnnnnnnnnnnnnnnnnnnnnnnnnnnnnnnnnnnnnnnnnnnnnnnnnnnnnnnnnnnnnnnnnnnnnnnnnnnnnnnnnnnnnnnnnnnnnnnnnnnnnnnnnnnnnnnnnnnnnnnnnnnnnnnnnnnnnnnnnnnnnnnnnnnnnnnnnnnnnnnnnnnnnnnnnnnnnnnnnnnnnnnnnnnnnnnnnnnnnnnnnnnnnnnnnnnnnnnnnnnnnnnnnnnnnnnnnnnnnnnnnnnnnnnnnnnnnnnnnnnnnnnnnnnnnnnnnnnnnnnnnnnnnnnnnnnnnnnnnnnnnnnnnnnnnnnnnnnnnnnnnnnnnnnnnnnnnnnnnnnnnnnnnnnnnnnnnnnnnnnnnnnnnnnnnnnnnnnnnnnnnnnnnnnnnnnnnnnnnnnnnnnnnnnnnnnnnnnnnnnnnnnnnnnnnnnnnnnnnnnnnnnnnnnnnnnnnnnnnnnnnnnnnnnnnnnnnnnnnnnnnnnnnnnnnnnnnnnnnnnnnnnnnnnnnnnnnnnnnnnnnnnnnnnnnnnnnnnnnnnnnnnnnnnnnnnnnnnnnnnnnnnnnnnnnnnnnnnnnnnnnnnnnnnnnnnnnnnnnnnnnnnnnnnnnnnnnnnnnnnnnnnnnnnnnnnnnnnnnnnnnnnnnnnnnnnnnnnnnnnnnnnnnnnnnnnnnnnnnnnnnnnnnnnnnnnnnnnnnnnnnnnnnnnnnnnnnnnnnnnnnnnnnnnnnnnnnnnnnnnnnnnnnnnnnnnnnnnnnnnnnnnnnnnnnnnnnnnnnnnnnnnnnnnnnnnnnnnnnnnnnnnnnnnnnnnnnnnnnnnnnnnnnnnnnnnnnnnnnnnnnnnnnnnnnnnnnnnnnnnnnnnnnnnnnnnnnnnnnnnnnnnnnnnnnnnnnnnnnnnnnnnnnnnnnnnnnnnnnnnnnnnnnnnnnnnnnnnnnnnnnnnnnnnnnnnnnnnnnnnnnnnnnnnnnnnnnnnnnnnnnnnnnnnnnnnnnnnnnnnnnnnnnnnnnnnnnnnnnnnnnnnnnnnnnnnnnnnnnnnnnnnnnnnnnnnnnnnnnnnnnnnnnnnnnnnnnnnnnnnnnnnnnnnnnnnnnnnnnnnnnnnnnnnnnnnnnnnnnnnnnnnnnnnnnnnnnnnnnnnnnnnnnnnnnnnnnnnnnnnnnnnnnnnnnnnnnnnnnnnnnnnnnnnnnnnnnnnnnnnnnnnnnnnnnnnnnnnnnnnnnnnnnnnnnnnnnnnnnnnnnnnnnnnnnnnnnnnnnnnnnnnnnnnnnnnnnnnnnnnnnnnnnnnnnnnnnnnnnnnnnnnnnnnnnnnnnnnnnnnnnnnnnnnnnnnnnnnnnnnnnnnnnnnnnnnnnnnnnnnnnnnnnnnnnnnnnnnnnnnnnnnnnnnnnnnnnnnnnnnnnnnnnnnnnnnnnnnnnnnnnnnnnnnnnnnnnnnnnnnnnnnnnnnnnnnnnnnnnnnnnnnnnnnnnnnnnnnnnnnnnnnnnnnnnnnnnnnnnnnnnnnnnnnnnnnnnnnnnnnnnnnnnnnnnnnnnnnnnnnnnnnnnnnnnnnnnnnnnnnnnnnnnnnnnnnnnnnnnnnnnnnnnnnnnnnnnnnnnnnnnnnnnnnnnnnnnnnnnnnnnnnnnnnnnnnnnnnnnnnnnnnnnnnnnnnnnnnnnnnnnnnnnnnnnnnnnnnnnnnnnnnnnnnnnnnnnnnnnnnnnnnnnnnnnnnnnnnnnnnnnnnnnnnnnnnnnnnnnnnnnnnnnnnnnnnnnnnnnnnnnnnnnnnnnnnnnnnnnnnnnnnnnnnnnnnnnnnnnnnnnnnnnnnnnnnnnnnnnnnnnnnnnnnnnnnnnnnnnnnnnnnnnnnnnnnnnnnnnnnnnnnnnnnnnnnnnnnnnnnnnnnnnnnnnnnnnnnnnnnnnnnnnnnnnnnnnnnnnnnnnnnnnnnnnnnnnnnnnnnnnnnnnnnnnnnnnnnnnnnnnnnnnnnnnnnnnnnnnnnnnnnnnnnnnnnnnnnnnnnnnnnnnnnnnnnnnnnnnnnnnnnnnnnnnnnnnnnnnnnnnnnnnnnnnnnnnnnnnnnnnnnnnnnnnnnnnnnnnnnnnnnnnnnnnnnnnnnnnnnnnnnnnnnnnnnnnnnnnnnnnnnnnnnnnnnnnnnnnnnnnnnnnnnnnnnnnnnnnnnnnnnnnnnnnnnnnnnnnnnnnnnnnnnnnnnnnnnnnnnnnnnnnnnnnnnnnnnnnnnnnnnnnnnnnnnnnnnnnnnnnnnnnnnnnnnnnnnnnnnnnnnnnnnnnnnnnnnnnnnnnnnnnnnnnnnnnnnnnnnnnnnnnnnnnnnnnnnnnnnnnnnnnnnnnnnnnnnnnnnnnnnnnnnnnnnnnnnnnnnnnnnnnnnnnnnnnnnnnnnnnnnnnnnnnnnnnnnnnnnnnnnnnnnnnnnnnnnnnnnnnnnnnnnnnnnnnnnnnnnnnnnnnnnnnnnnnnnnnnnnnnnnnnnnnnnnnnnnnnnnnnnnnnnnnnnnnnnnnnnnnnnnnnnnnnnnnnnnnnnnnnnnnnnnnnnnnnnnnnnnnnnnnnnnnnnnnnnnnnnnnnnnnnnnnnnnnnnnnnnnnnnnnnnnnnnnnnnnnnnnnnnnnnnnnnnnnnnnnnnnnnnnnnnnnnnnnnnnnnnnnnnnnnnnnnnnnnnnnnnnnnnnnnnnnnnnnnnnnnnnnnnnnnnnnnnnnnnnnnnnnnnnnnnnnnnnnnnnnnnnnnnnnnnnnnnnnnnnnnnnnnnnnnnnnnnnnnnnnnnnnnnnnnnnnnnnnnnnnnnnnnnnnnnnnnnnnnnnnnnnnnnnnnnnnnnnnnnnnnnnnnnnnnnnnnnnnnnnnnnnnnnnnnnnnnnnnnnnnnnnnnnnnnnnnnnnnnnnnnnnnnnnnnnnnnnnnnnnnnnnnnnnnnnnnnnnnnnnnnnnnnnnnnnnnnnnnnnnnnnnnnnnnnnnnnnnnnnnnnnnnnnnnnnnnnnnnnnnnnnnnnnnnnnnnnnnnnnnnnnnnnnnnnnnnnnnnnnnnnnnnnnnnnnnnnnnnnnnnnnnnnnnnnnnnnnnnnnnnnnnnnnnnnnnnnnnnnnnnnnnnnnnnnnnnnnnnnnnnnnnnnnnnnnnnnnnnnnnnnnnnnnnnnnnnnnnnnnnnnnnnnnnnnnnnnnnnnnnnnnnnnnnnnnnnnnnnnnnnnnnnnnnnnnnnnnnnnnnnnnnnnnnnnnnnnnnnnnnnnnnnnnnnnnnnnnnnnnnnnnnnnnnnnnnnnnnnnnnnnnnnnnnnnnnnnnnnnnnnnnnnnnnnnnnnnnnnnnnnnnnnnnnnnnnnnnnnnnnnnnnnnnnnnnnnnnnnnnnnnnnnnnnnnnnnnnnnnnnnnnnnnnnnnnnnnnnnnnnnnnnnnnnnnnnnnnnnnnnnnnnnnnnnnnnnnnnnnnnnnnnnnnnnnnnnnnnnnnnnnnnnnnnnnnnnnnnnnnnnnnnnnnnnnnnnnnnnnnnnnnnnnnnnnnnnnnnnnnnnnnnnnnnnnnnnnnnnnnnnnnnnnnnnnnnnnnnnnnnnnnnnnnnnnnnnnnnnnnnnnnnnnnnnnnnnnnnnnnnnnnnnnnnnnnnnnnnnnnnnnnnnnnnnnnnnnnnnnnnnnnnnnnnnnnnnnnnnnnnnnnnnnnnnnnnnnnnnnnnnnnnnnnnnnnnnnnnnnnnnnnnnnnnnnnnnnnnnnnnnnnnnnnnnnnnnnnnnnnnnnnnnnnnnnnnnnnnnnnnnnnnnnnnnnnnnnnnnnnnnnnnnnnnnnnnnnnnnnnnnnnnnnnnnnnnnnnnnnnnnnnnnnnnnnnnnnnnnnnnnnnnnnnnnnnnnnnnnnnnnnnnnnnnnnnnnnnnnnnnnnnnnnnnnnnnnnnnnnnnnnnnnnnnnnnnnnnnnnnnnnnnnnnnnnnnnnnnnnnnnnnnnnnnnnnnnnnnnnnnnnnnnnnnnnnnnnnnnnnnnnnnnnnnnnnnnnnnnnnnnnnnnnnnnnnnnnnnnnnnnnnnnnnnnnnnnnnnnnnnnnnnnnnnnnnnnnnnnnnnnnnnnnnnnnnnnnnnnnnnnnnnnnnnnnnnnnnnnnnnnnnnnnnnnnnnnnnnnnnnnnnnnnnnnnnnnnnnnnnnnnnnnnnnnnnnnnnnnnnnnnnnnnnnnnnnnnnnnnnnnnnnnnnnnnnnnnnnnnnnnnnnnnnnnnnnnnnnnnnnnnnnnnnnnnnnnnnnnnnnnnnnnnnnnnnnnnnnnnnnnnnnnnnnnnnnnnnnnnnnnnnnnnnnnnnnnnnnnnnnnnnnnnnnnnnnnnnnnnnnnnnnnnnnnnnnnnnnnnnnnnnnnnnnnnnnnnnnnnnnnnnnnnnnnnnnnnnnnnnnnnnnnnnnnnnnnnnnnnnnnnnnnnnnnnnnnnnnnnnnnnnnnnnnnnnnnnnnnnnnnnnnnnnnnnnnnnnnnnnnnnnnnnnnnnnnnnnnnnnnnnnnnnnnnnnnnnnnnnnnnnnnnnnnnnnnnnnnnnnnnnnnnnnnnnnnnnnnnnnnnnnnnnnnnnnnnnnnnnnnnnnnnnnnnnnnnnnnnnnnnnnnnnnnnnnnnnnnnnnnnnnnnnnnnnnnnnnnnnnnnnnnnnnnnnnnnnnnnnnnnnnnnnnnnnnnnnnnnnnnnnnnnnnnnnnnnnnnnnnnnnnnnnnnnnnnnnnnnnnnnnnnnnnnnnnnnnnnnnnnnnnnnnnnnnnnnnnnnnnnnnnnnnnnnnnnnnnnnnnnnnnnnnnnnnnnnnnnnnnnnnnnnnnnnnnnnnnnnnnnnnnnnnnnnnnnnnnnnnnnnnnnnnnnnnnnnnnnnnnnnnnnnnnnnnnnnnnnnnnnnnnnnnnnnnnnnnnnnnnnnnnnnnnnnnnnnnnnnnnnnnnnnnnnnnnnnnnnnnnnnnnnnnnnnnnnnnnnnnnnnnnnnnnnnnnnnnnnnnnnnnnnnnnnnnnnnnnnnnnnnnnnnnnnnnnnnnnnnnnnnnnnnnnnnnnnnnnnnnnnnnnnnnnnnnnnnnnnnnnnnnnnnnnnnnnnnnnnnnnnnnnnnnnnnnnnnnnnnnnnnnnnnnnnnnnnnnnnnnnnnnnnnnnnnnnnnnnnnnnnnnnnnnnnnnnnnnnnnnnnnnnnnnnnnnnnnnnnnnnnnnnnnnnnnnnnnnnnnnnnnnnnnnnnnnnnnnnnnnnnnnnnnnnnnnnnnnnnnnnnnnnnnnnnnnnnnnnnnnnnnnnnnnnnnnnnnnnnnnnnnnnnnnnnnnnnnnnnnnnnnnnnnnnnnnnnnnnnnnnnnnnnnnnnnnnnnnnnnnnnnnnnnnnnnnnnnnnnnnnnnnnnnnnnnnnnnnnnnnnnnnnnnnnnnnnnnnnnnnnnnnnnnnnnnnnnnnnnnnnnnnnnnnnnnnnnnnnnnnnnnnnnnnnnnnnnnnnnnnnnnnnnnnnnnnnnnnnnnnnnnnnnnnnnnnnnnnnnnnnnnnnnnnnnnnnnnnnnnnnnnnnnnnnnnnnnnnnnnnnnnnnnnnnnnnnnnnnnnnnnnnnnnnnnnnnnnnnnnnnnnnnnnnnnnnnnnnnnnnnnnnnnnnnnnnnnnnnnnnnnnnnnnnnnnnnnnnnnnnnnnnnnnnnnnnnnnnnnnnnnnnnnnnnnnnnnnnnnnnnnnnnnnnnnnnnnnnnnnnnnnnnnnnnnnnnnnnnnnnnnnnnnnnnnnnnnnnnnnnnnnnnnnnnnnnnnnnnnnnnnnnnnnnnnnnnnnnnnnnnnnnnnnnnnnnnnnnnnnnnnnnnnnnnnnnnnnnnnnnnnnnnnnnnnnnnnnnnnnnnnnnnnnnnnnnnnnnnnnnnnnnnnnnnnnnnnnnnnnnnnnnnnnnnnnnnnnnnnnnnnnnnnnnnnnnnnnnnnnnnnnnnnnnnnnnnnnnnnnnnnnnnnnnnnnnnnnnnnnnnnnnnnnnnnnnnnnnnnnnnnnnnnnnnnnnnnnnnnnnnnnnnnnnnnnnnnnnnnnnnnnnnnnnnnnnnnnnnnnnnnnnnnnnnnnnnnnnnnnnnnnnnnnnnnnnnnnnnnnnnnnnnnnnnnnnnnnnnnnnnnnnnnnnnnnnnnnnnnnnnnnnnnnnnnnnnnnnnnnnnnnnnnnnnnnnnnnnnnnnnnnnnnnnnnnnnnnnnnnnnnnnnnnnnnnnnnnnnnnnnnnnnnnnnnnnnnnnnnnnnnnnnnnnnnnnnnnnnnnnnnnnnnnnnnnnnnnnnnnnnnnnnnnnnnnnnnnnnnnnnnnnnnnnnnnnnnnnnnnnnnnnnnnnnnnnnnnnnnnnnnnnnnnnnnnnnnnnnnnnnnnnnnnnnnnnnnnnnnnnnnnnnnnnnnnnnnnnnnnnnnnnnnnnnnnnnnnnnnnnnnnnnnnnnnnnnnnnnnnnnnnnnnnnnnnnnnnnnnnnnnnnnnnnnnnnnnnnnnnnnnnnnnnnnnnnnnnnnnnnnnnnnnnnnnnnnnnnnnnnnnnnnnnnnnnnnnnnnnnnnnnnnnnnnnnnnnnnnnnnnnnnnnnnnnnnnnnnnnnnnnnnnnnnnnnnnnnnnnnnnnnnnnnnnnnnnnnnnnnnnnnnnnnnnnnnnnnnnnnnnnnnnnnnnnnnnnnnnnnnnnnnnnnnnnnnnnnnnnnnnnnnnnnnnnnnnnnnnnnnnnnnnnnnnnnnnnnnnnnnnnnnnnnnnnnnnnnnnnnnnnnnnnnnnnnnnnnnnnnnnnnnnnnnnnnnnnnnnnnnnnnnnnnnnnnnnnnnnnnnnnnnnnnnnnnnnnnnnnnnnnnnnnnnnnnnnnnnnnnnnnnnnnnnnnnnnnnnnnnnnnnnnnnnnnnnnnnnnnnnnnnnnnnnnnnnnnnnnnnnnnnnnnnnnnnnnnnnnnnnnnnnnnnnnnnnnnnnnnnnnnnnnnnnnnnnnnnnnnnnnnnnnnnnnnnnnnnnnnnnnnnnnnnnnnnnnnnnnnnnnnnnnnnnnnnnnnnnnnnnnnnnnnnnnnnnnnnnnnnnnnnnnnnnnnnnnnnnnnnnnnnnnnnnnnnnnnnnnnnnnnnnnnnnnnnnnnnnnnnnnnnnnnnnnnnnnnnnnnnnnnnnnnnnnnnnnnnnnnnnnnnnnnnnnnnnnnnnnnnnnnnnnnnnnnnnnnnnnnnnnnnnnnnnnnnnnnnnnnnnnnnnnnnnnnnnnnnnnnnnnnnnnnnnnnnnnnnnnnnnnnnnnnnnnnnnnnnnnnnnnnnnnnnnnnnnnnnnnnnnnnnnnnnnnnnnnnnnnnnnnnnnnnnnnnnnnnnnnnnnnnnnnnnnnnnnnnnnnnnnnnnnnnnnnnnnnnnnnnnnnnnnnnnnnnnnnnnnnnnnnnnnnnnnnnnnnnnnnnnnnnnnnnnnnnnnnnnnnnnnnnnnnnnnnnnnnnnnnnnnnnnnnnnnnnnnnnnnnnnnnnnnnnnnnnnnnnnnnnnnnnnnnnnnnnnnnnnnnnnnnnnnnnnnnnnnnnnnnnnnnnnnnnnnnnnnnnnnnnnnnnnnnnnnnnnnnnnnnnnnnnnnnnnnnnnnnnnnnnnnnnnnnnnnnnnnnnnnnnnnnnnnnnnnnnnnnnnnnnnnnnnnnnnnnnnnnnnnnnnnnnnnnnnnnnnnnnnnnnnnnnnnnnnnnnnnnnnnnnnnnnnnnnnnnnnnnnnnnnnnnnnnnnnnnnnnnnnnnnnnnnnnnnnnnnnnnnnnnnnnnnnnnnnnnnnnnnnnnnnnnnnnnnnnnnnnnnnnnnnnnnnnnnnnnnnnnnnnnnnnnnnnnnnnnnnnnnnnnnnnnnnnnnnnnnnnnnnnnnnnnnnnnnnnnnnnnnnnnnnnnnnnnnnnnnnnnnnnnnnnnnnnnnnnnnnnnnnnnnnnnnnnnnnnnnnnnnnnnnnnnnnnnnnnnnnnnnnnnnnnnnnnnnnnnnnnnnnnnnnnnnnnnnnnnnnnnnnnnnnnnnnnnnnnnnnnnnnnnnnnnnnnnnnnnnnnnnnnnnnnnnnnnnnnnnnnnnnnnnnnnnnnnnnnnnnnnnnnnnnnnnnnnnnnnnnnnnnnnnnnnnnnnnnnnnnnnnnnnnnnnnnnnnnnnnnnnnnnnnnnnnnnnnnnnnnnnnnnnnnnnnnnnnnnnnnnnnnnnnnnnnnnnnnnnnnnnnnnnnnnnnnnnnnnnnnnnnnnnnnnnnnnnnnnnnnnnnnnnnnnnnnnnnnnnnnnnnnnnnnnnnnnnnnnnnnnnnnnnnnnnnnnnnnnnnnnnnnnnnnnnnnnnnnnnnnnnnnnnnnnnnnnnnnnnnnnnnnnnnnnnnnnnnnnnnnnnnnnnnnnnnnnnnnnnnnnnnnnnnnnnnnnnnnnnnnnnnnnnnnnnnnnnnnnnnnnnnnnnnnnnnnnnnnnnnnnnnnnnnnnnnnnnnnnnnnnnnnnnnnnnnnnnnnnnnnnnnnnnnnnnnnnnnnnnnnnnnnnnnnnnnnnnnnnnnnnnnnnnnnnnnnnnnnnnnnnnnnnnnnnnnnnnnnnnnnnnnnnnnnnnnnnnnnnnnnnnnnnnnnnnnnnnnnnnnnnnnnnnnnnnnnnnnnnnnnnnnnnnnnnnnnnnnnnnnnnnnnnnnnnnnnnnnnnnnnnnnnnnnnnnnnnnnnnnnnnnnnnnnnnnnnnnnnnnnnnnnnnnnnnnnnnnnnnnnnnnnnnnnnnnnnnnnnnnnnnnnnnnnnnnnnnnnnnnnnnnnnnnnnnnnnnnnnnnnnnnnnnnnnnnnnnnnnnnnnnnnnnnnnnnnnnnnnnnnnnnnnnnnnnnnnnnnnnnnnnnnnnnnnnnnnnnnnnnnnnnnnnnnnnnnnnnnnnnnnnnnnnnnnnnnnnnnnnnnnnnnnnnnnnnnnnnnnnnnnnnnnnnnnnnnnnnnnnnnnnnnnnnnnnnnnnnnnnnnnnnnnnnnnnnnnnnnnnnnnnnnnnnnnnnnnnnnnnnnnnnnnnnnnnnnnnnnnnnnnnnnnnnnnnnnnnnnnnnnnnnnnnnnnnnnnnnnnnnnnnnnnnnnnnnnnnnnnnnnnnnnnnnnnnnnnnnnnnnnnnnnnnnnnnnnnnnnnnnnnnnnnnnnnnnnnnnnnnnnnnnnnnnnnnnnnnnnnnnnnnnnnnnnnnnnnnnnnnnnnnnnnnnnnnnnnnnnnnnnnnnnnnnnnnnnnnnnnnnnnnnnnnnnnnnnnnnnnnnnnnnnnnnnnnnnnnnnnnnnnnnnnnnnnnnnnnnnnnnnnnnnnnnnnnnnnnnnnnnnnnnnnnnnnnnnnnnnnnnnnnnnnnnnnnnnnnnnnnnnnnnnnnnnnnnnnnnnnnnnnnnnnnnnnnnnnnnnnnnnnnnnnnnnnnnnnnnnnnnnnnnnnnnnnnnnnnnnnnnnnnnnnnnnnnnnnnnnnnnnnnnnnnnnnnnnnnnnnnnnnnnnnnnnnnnnnnnnnnnnnnnnnnnnnnnnnnnnnnnnnnnnnnnnnnnnnnnnnnnnnnnnnnnnnnnnnnnnnnnnnnnnnnnnnnnnnnnnnnnnnnnnnnnnnnnnnnnnnnnnnnnnnnnnnnnnnnnnnnnnnnnnnnnnnnnnnnnnnnnnnnnnnnnnnnnnnnnnnnnnnnnnnnnnnnnnnnnnnnnnnnnnnnnnnnnnnnnnnnnnnnnnnnnnnnnnnnnnnnnnnnnnnnnnnnnnnnnnnnnnnnnnnnnnnnnnnnnnnnnnnnnnnnnnnnnnnnnnnnnnnnnnnnnnnnnnnnnnnnnnnnnnnnnnnnnnnnnnnnnnnnnnnnnnnnnnnnnnnnnnnnnnnnnnnnnnnnnnnnnnnnnnnnnnnnnnnnnnnnnnnnnnnnnnnnnnnnnnnnnnnnnnnnnnnnnnnnnnnnnnnnnnnnnnnnnnnnnnnnnnnnnnnnnnnnnnnnnnnnnnnnnnnnnnnnnnnnnnnnnnnnnnnnnnnnnnnnnnnnnnnnnnnnnnnnnnnnnnnnnnnnnnnnnnnnnnnnnnnnnnnnnnnnnnnnnnnnnnnnnnnnnnnnnnnnnnnnnnnnnnnnnnnnnnnnnnnnnnnnnnnnnnnnnnnnnnnnnnnnnnnnnnnnnnnnnnnnnnnnnnnnnnnnnnnnnnnnnnnnnnnnnnnnnnnnnnnnnnnnnnnnnnnnnnnnnnnnnnnnnnnnnnnnnnnnnnnnnnnnnnnnnnnnnnnnnnnnnnnnnnnnnnnnnnnnnnnnnnnnnnnnnnnnnnnnnnnnnnnnnnnnnnnnnnnnnnnnnnnnnnnnnnnnnnnnnnnnnnnnnnnnnnnnnnnnnnnnnnnnnnnnnnnnnnnnnnnnnnnnnnnnnnnnnnnnnnnnnnnnnnnnnnnnnnnnnnnnnnnnnnnnnnnnnnnnnnnnnnnnnnnnnnnnnnnnnnnnnnnnnnnnnnnnnnnnnnnnnnnnnnnnnnnnnnnnnnnnnnnnnnnnnnnnnnnnnnnnnnnnnnnnnnnnnnnnnnnnnnnnnnnnnnnnnnnnnnnnnnnnnnnnnnnnnnnnnnnnnnnnnnnnnnnnnnnnnnnnnnnnnnnnnnnnnnnnnnnnnnnnnnnnnnnnnnnnnnnnnnnnnnnnnnnnnnnnnnnnnnnnnnnnnnnnnnnnnnnnnnnnnnnnnnnnnnnnnnnnnnnnnnnnnnnnnnnnnnnnnnnnnnnnnnnnnnnnnnnnnnnnnnnnnnnnnnnnnnnnnnnnnnnnnnnnnnnnnnnnnnnnnnnnnnnnnnnnnnnnnnnnnnnnnnnnnnnnnnnnnnnnnnnnnnnnnnnnnnnnnnnnnnnnnnnnnnnnnnnnnnnnnnnnnnnnnnnnnnnnnnnnnnnnnnnnnnnnnnnnnnnnnnnnnnnnnnnnnnnnnnnnnnnnnnnnnnnnnnnnnnnnnnnnnnnnnnnnnnnnnnnnnnnnnnnnnnnnnnnnnnnnnnnnnnnnnnnnnnnnnnnnnnnnnnnnnnnnnnnnnnnnnnnnnnnnnnnnnnnnnnnnnnnnnnnnnnnnnnnnnnnnnnnnnnnnnnnnnnnnnnnnnnnnnnnnnnnnnnnnnnnnnnnnnnnnnnnnnnnnnnnnnnnnnnnnnnnnnnnnnnnnnnnnnnnnnnnnnnnnnnnnnnnnnnnnnnnnnnnnnnnnnnnnnnnnnnnnnnnnnnnnnnnnnnnnnnnnnnnnnnnnnnnnnnnnnnnnnnnnnnnnnnnnnnnnnnnnnnnnnnnnnnnnnnnnnnnnnnnnnnnnnnnnnnnnnnnnnnnnnnnnnnnnnnnnnnnnnnnnnnnnnnnnnnnnnnnnnnnnnnnnnnnnnnnnnnnnnnnnnnnnnnnnnnnnnnnnnnnnnnnnnnnnnnnnnnnnnnnnnnnnnnnnnnnnnnnnnnnnnnnnnnnnnnnnnnnnnnnnnnnnnnnnnnnnnnnnnnnnnnnnnnnnnnnnnnnnnnnnnnnnnnnnnnnnnnnnnnnnnnnnnnnnnnnnnnnnnnnnnnnnnnnnnnnnnnnnnnnnnnnnnnnnnnnnnnnnnnnnnnnnnnnnnnnnnnnnnnnnnnnnnnnnnnnnnnnnnnnnnnnnnnnnnnnnnnnnnnnnnnnnnnnnnnnnnnnnnnnnnnnnnnnnnnnnnnnnnnnnnnnnnnnnnnnnnnnnnnnnnnnnnnnnnnnnnnnnnnnnnnnnnnnnnnnnnnnnnnnnnnnnnnnnnnnnnnnnnnnnnnnnnnnnnnnnnnnnnnnnnnnnnnnnnnnnnnnnnnnnnnnnnnnnnnnnnnnnnnnnnnnnnnnnnnnnnnnnnnnnnnnnnnnnnnnnnnnnnnnnnnnnnnnnnnnnnnnnnnnnnnnnnnnnnnnnnnnnnnnnnnnnnnnnnnnnnnnnnnnnnnnnnnnnnnnnnnnnnnnnnnnnnnnnnnnnnnnnnnnnnnnnnnnnnnnnnnnnnnnnnnnnnnnnnnnnnnnnnnnnnnnnnnnnnnnnnnnnnnnnnnnnnnnnnnnnnnnnnnnnnnnnnnnnnnnnnnnnnnnnnnnnnnnnnnnnnnnnnnnnnnnnnnnnnnnnnnnnnnnnnnnnnnnnnnnnnnnnnnnnnnnnnnnnnnnnnnnnnnnnnnnnnnnnnnnnnnnnnnnnnnnnnnnnnnnnnnnnnnnnnnnnnnnnnnnnnnnnnnnnnnnnnnnnnnnnnnnnnnnnnnnnnnnnnnnnnnnnnnnnnnnnnnnnnnnnnnnnnnnnnnnnnnnnnnnnnnnnnnnnnnnnnnnnnnnnnnnnnnnnnnnnnnnnnnnnnnnnnnnnnnnnnnnnnnnnnnnnnnnnnnnnnnnnnnnnnnnnnnnnnnnnnnnnnnnnnnnnnnnnnnnnnnnnnnnnnnnnnnnnnnnnnnnnnnnnnnnnnnnnnnnnnnnnnnnnnnnnnnnnnnnnnnnnnnnnnnnnnnnnnnnnnnnnnnnnnnnnnnnnnnnnnnnnnnnnnnnnnnnnnnnnnnnnnnnnnnnnnnnnnnnnnnnnnnnnnnnnnnnnnnnnnnnnnnnnnnnnnnnnnnnnnnnnnnnnnnnnnnnnnnnnnnnnnnnnnnnnnnnnnnnnnnnnnnnnnnnnnnnnnnnnnnnnnnnnnnnnnnnnnnnnnnnnnnnnnnnnnnnnnnnnnnnnnnnnnnnnnnnnnnnnnnnnnnnnnnnnnnnnnnnnnnnnnnnnnnnnnnnnnnnnnnnnnnnnnnnnnnnnnnnnnnnnnnnnnnnnnnnnnnnnnnnnnnnnnnnnnnnnnnnnnnnnnnnnnnnnnnnnnnnnnnnnnnnnnnnnnnnnnnnnnnnnnnnnnnnnnnnnnnnnnnnnnnnnnnnnnnnnnnnnnnnnnnnnnnnnnnnnnnnnnnnnnnnnnnnnnnnnnnnnnnnnnnnnnnnnnnnnnnnnnnnnnnnnnnnnnnnnnnnnnnnnnnnnnnnnnnnnnnnnnnnnnnnnnnnnnnnnnnnnnnnnnnnnnnnnnnnnnnnnnnnnnnnnnnnnnnnnnnnnnnnnnnnnnnnnnnnnnnnnnnnnnnnnnnnnnnnnnnnnnnnnnnnnnnnnnnnnnnnnnnnnnnnnnnnnnnnnnnnnnnnnnnnnnnnnnnnnnnnnnnnnnnnnnnnnnnnnnnnnnnnnnnnnnnnnnnnnnnnnnnnnnnnnnnnnnnnnnnnnnnnnnnnnnnnnnnnnnnnnnnnnnnnnnnnnnnnnnnnnnnnnnnnnnnnnnnnnnnnnnnnnnnnnnnnnnnnnnnnnnnnnnnnnnnnnnnnnnnnnnnnnnnnnnnnnnnnnnnnnnnnnnnnnnnnnnnnnnnnnnnnnnnnnnnnnnnnnnnnnnnnnnnnnnnnnnnnnnnnnnnnnnnnnnnnnnnnnnnnnnnnnnnnnnnnnnnnnnnnnnnnnnnnnnnnnnnnnnnnnnnnnnnnnnnnnnnnnnnnnnnnnnnnnnnnnnnnnnnnnnnnnnnnnnnnnnnnnnnnnnnnnnnnnnnnnnnnnnnnnnnnnnnnnnnnnnnnnnnnnnnnnnnnnnnnnnnnnnnnnnnnnnnnnnnnnnnnnnnnnnnnnnnnnnnnnnnnnnnnnnnnnnnnnnnnnnnnnnnnnnnnnnnnnnnnnnnnnnnnnnnnnnnnnnnnnnnnnnnnnnnnnnnnnnnnnnnnnnnnnnnnnnnnnnnnnnnnnnnnnnnnnnnnnnnnnnnnnnnnnnnnnnnnnnnnnnnnnnnnnnnnnnnnnnnnnnnnnnnnnnnnnnnnnnnnnnnnnnnnnnnnnnnnnnnnnnnnnnnnnnnnnnnnnnnnnnnnnnnnnnnnnnnnnnnnnnnnnnnnnnnnnnnnnnnnnnnnnnnnnnnnnnnnnnnnnnnnnnnnnnnnnnnnnnnnnnnnnnnnnnnnnnnnnnnnnnnnnnnnnnnnnnnnnnnnnnnnnnnnnnnnnnnnnnnnnnnnnnnnnnnnnnnnnnnnnnnnnnnnnnnnnnnnnnnnnnnnnnnnnnnnnnnnnnnnnnnnnnnnnnnnnnnnnnnnnnnnnnnnnnnnnnnnnnnnnnnnnnnnnnnnnnnnnnnnnnnnnnnnnnnnnnnnnnnnnnnnnnnnnnnnnnnnnnnnnnnnnnnnnnnnnnnnnnnnnnnnnnnnnnnnnnnnnnnnnnnnnnnnnnnnnnnnnnnnnnnnnnnnnnnnnnnnnnnnnnnnnnnnnnnnnnnnnnnnnnnnnnnnnnnnnnnnnnnnnnnnnnnnnnnnnnnnnnnnnnnnnnnnnnnnnnnnnnnnnnnnnnnnnnnnnnnnnnnnnnnnnnnnnnnnnnnnnnnnnnnnnnnnnnnnnnnnnnnnnnnnnnnnnnnnnnnnnnnnnnnnnnnnnnnnnnnnnnnnnnnnnnnnnnnnnnnnnnnnnnnnnnnnnnnnnnnnnnnnnnnnnnnnnnnnnnnnnnnnnnnnnnnnnnnnnnnnnnnnnnnnnnnnnnnnnnnnnnnnnnnnnnnnnnnnnnnnnnnnnnnnnnnnnnnnnnnnnnnnnnnnnnnnnnnnnnnnnnnnnnnnnnnnnnnnnnnnnnnnnnnnnnnnnnnnnnnnnnnnnnnnnnnnnnnnnnnnnnnnnnnnnnnnnnnnnnnnnnnnnnnnnnnnnnnnnnnnnnnnnnnnnnnnnnnnnnnnnnnnnnnnnnnnnnnnnnnnnnnnnnnnnnnnnnnnnnnnnnnnnnnnnnnnnnnnnnnnnnnnnnnnnnnnnnnnnnnnnnnnnnnnnnnnnnnnnnnnnnnnnnnnnnnnnnnnnnnnnnnnnnnnnnnnnnnnnnnnnnnnnnnnnnnnnnnnnnnnnnnnnnnnnnnnnnnnnnnnnnnnnnnnnnnnnnnnnnnnnnnnnnnnnnnnnnnnnnnnnnnnnnnnnnnnnnnnnnnnnnnnnnnnnnnnnnnnnnnnnnnnnnnnnnnnnnnnnnnnnnnnnnnnnnnnnnnnnnnnnnnnnnnnnnnnnnnnnnnnnnnnnnnnnnnnnnnnnnnnnnnnnnnnnnnnnnnnnnnnnnnnnnnnnnnnnnnnnnnnnnnnnnnnnnnnnnnnnnnnnnnnnnnnnnnnnnnnnnnnnnnnnnnnnnnnnnnnnnnnnnnnnnnnnnnnnnnnnnnnnnnnnnnnnnnnnnnnnnnnnnnnnnnnnnnnnnnnnnnnnnnnnnnnnnnnnnnnnnnnnnnnnnnnnnnnnnnnnnnnnnnnnnnnnnnnnnnnnnnnnnnnnnnnnnnnnnnnnnnnnnnnnnnnnnnnnnnnnnnnnnnnnnnnnnnnnnnnnnnnnnnnnnnnnnnnnnnnnnnnnnnnnnnnnnnnnnnnnnnnnnnnnnnnnnnnnnnnnnnnnnnnnnnnnnnnnnnnnnnnnnnnnnnnnnnnnnnnnnnnnnnnnnnnnnnnnnnnnnnnnnnnnnnnnnnnnnnnnnnnnnnnnnnnnnnnnnnnnnnnnnnnnnnnnnnnnnnnnnnnnnnnnnnnnnnnnnnnnnnnnnnnnnnnnnnnnnnnnnnnnnnnnnnnnnnnnnnnnnnnnnnnnnnnnnnnnnnnnnnnnnnnnnnnnnnnnnnnnnnnnnnnnnnnnnnnnnnnnnnnnnnnnnnnnnnnnnnnnnnnnnnnnnnnnnnnnnnnnnnnnnnnnnnnnnnnnnnnnnnnnnnnnnnnnnnnnnnnnnnnnnnnnnnnnnnnnnnnnnnnnnnnnnnnnnnnnnnnnnnnnnnnnnnnnnnnnnnnnnnnnnnnnnnnnnnnnnnnnnnnnnnnnnnnnnnnnnnnnnnnnnnnnnnnnnnnnnnnnnnnnnnnnnnnnnnnnnnnnnnnnnnnnnnnnnnnnnnnnnnnnnnnnnnnnnnnnnnnnnnnnnnnnnnnnnnnnnnnnnnnnnnnnnnnnnnnnnnnnnnnnnnnnnnnnnnnnnnnnnnnnnnnnnnnnnnnnnnnnnnnnnnnnnnnnnnnnnnnnnnnnnnnnnnnnnnnnnnnnnnnnnnnnnnnnnnnnnnnnnnnnnnnnnnnnnnnnnnnnnnnnnnnnnnnnnnnnnnnnnnnnnnnnnnnnnnnnnnnnnnnnnnnnnnnnnnnnnnnnnnnnnnnnnnnnnnnnnnnnnnnnnnnnnnnnnnnnnnnnnnnnnnnnnnnnnnnnnnnnnnnnnnnnnnnnnnnnnnnnnnnnnnnnnnnnnnnnnnnnnnnnnnnnnnnnnnnnnnnnnnnnnnnnnnnnnnnnnnnnnnnnnnnnnnnnnnnnnnnnnnnnnnnnnnnnnnnnnnnnnnnnnnnnnnnnnnnnnnnnnnnnnnnnnnnnnnnnnnnnnnnnnnnnnnnnnnnnnnnnnnnnnnnnnnnnnnnnnnnnnnnnnnnnnnnnnnnnnnnnnnnnnnnnnnnnnnnnnnnnnnnnnnnnnnnnnnnnnnnnnnnnnnnnnnnnnnnnnnnnnnnnnnnnnnnnnnnnnnnnnnnnnnnnnnnnnnnnnnnnnnnnnnnnnnnnnnnnnnnnnnnnnnnnnnnnnnnnnnnnnnnnnnnnnnnnnnnnnnnnnnnnnnnnnnnnnnnnnnnnnnnnnnnnnnnnnnnnnnnnnnnnnnnnnnnnnnnnnnnnnnnnnnnnnnnnnnnnnnnnnnnnnnnnnnnnnnnnnnnnnnnnnnnnnnnnnnnnnnnnnnnnnnnnnnnnnnnnnnnnnnnnnnnnnnnnnnnnnnnnnnnnnnnnnnnnnnnnnnnnnnnnnnnnnnnnnnnnnnnnnnnnnnnnnnnnnnnnnnnnnnnnnnnnnnnnnnnnnnnnnnnnnnnnnnnnnnnnnnnnnnnnnnnnnnnnnnnnnnnnnnnnnnnnnnnnnnnnnnnnnnnnnnnnnnnnnnnnnnnnnnnnnnnnnnnnnnnnnnnnnnnnnnnnnnnnnnnnnnnnnnnnnnnnnnnnnnnnnnnnnnnnnnnnnnnnnnnnnnnnnnnnnnnnnnnnnnnnnnnnnnnnnnnnnnnnnnnnnnnnnnnnnnnnnnnnnnnnnnnnnnnnnnnnnnnnnnnnnnnnnnnnnnnnnnnnnnnnnnnnnnnnnnnnnnnnnnnnnnnnnnnnnnnnnnnnnnnnnnnnnnnnnnnnnnnnnnnnnnnnnnnnnnnnnnnnnnnnnnnnnnnnnnnnnnnnnnnnnnnnnnnnnnnnnnnnnnnnnnnnnnnnnnnnnnnnnnnnnnnnnnnnnnnnnnnnnnnnnnnnnnnnnnnnnnnnnnnnnnnnnnnnnnnnnnnnnnnnnnnnnnnnnnnnnnnnnnnnnnnnnnnnnnnnnnnnnnnnnnnnnnnnnnnnnnnnnnnnnnnnnnnnnnnnnnnnnnnnnnnnnnnnnnnnnnnnnnnnnnnnnnnnnnnnnnnnnnnnnnnnnnnnnnnnnnnnnnnnnnnnnnnnnnnnnnnnnnnnnnnnnnnnnnnnnnnnnnnnnnnnnnnnnnnnnnnnnnnnnnnnnnnnnnnnnnnnnnnnnnnnnnnnnnnnnnnnnnnnnnnnnnnnnnnnnnnnnnnnnnnnnnnnnnnnnnnnnnnnnnnnnnnnnnnnnnnnnnnnnnnnnnnnnnnnnnnnnnnnnnnnnnnnnnnnnnnnnnnnnnnnnnnnnnnnnnnnnnnnnnnnnnnnnnnnnnnnnnnnnnnnnnnnnnnnnnnnnnnnnnnnnnnnnnnnnnnnnnnnnnnnnnnnnnnnnnnnnnnnnnnnnnnnnnnnnnnnnnnnnnnnnnnnnnnnnnnnnnnnnnnnnnnnnnnnnnnnnnnnnnnnnnnnnnnnnnnnnnnnnnnnnnnnnnnnnnnnnnnnnnnnnnnnnnnnnnnnnnnnnnnnnnnnnnnnnnnnnnnnnnnnnnnnnnnnnnnnnnnnnnnnnnnnnnnnnnnnnnnnnnnnnnnnnnnnnnnnnnnnnnnnnnnnnnnnnnnnnnnnnnnnnnnnnnnnnnnnnnnnnnnnnnnnnnnnnnnnnnnnnnnnnnnnnnnnnnnnnnnnnnnnnnnnnnnnnnnnnnnnnnnnnnnnnnnnnnnnnnnnnnnnnnnnnnnnnnnnnnnnnnnnnnnnnnnnnnnnnnnnnnnnnnnnnnnnnnnnnnnnnnnnnnnnnnnnnnnnnnnnnnnnnnnnnnnnnnnnnnnnnnnnnnnnnnnnnnnnnnnnnnnnnnnnnnnnnnnnnnnnnnnnnnnnnnnnnnnnnnnnnnnnnnnnnnnnnnnnnnnnnnnnnnnnnnnnnnnnnnnnnnnnnnnnnnnnnnnnnnnnnnnnnnnnnnnnnnnnnnnnnnnnnnnnnnnnnnnnnnnnnnnnnnnnnnnnnnnnnnnnnnnnnnnnnnnnnnnnnnnnnnnnnnnnnnnnnnnnnnnnnnnnnnnnnnnnnnnnnnnnnnnnnnnnnnnnnnnnnnnnnnnnnnnnnnnnnnnnnnnnnnnnnnnnnnnnnnnnnnnnnnnnnnnnnnnnnnnnnnnnnnnnnnnnnnnnnnnnnnnnnnnnnnnnnnnnnnnnnnnnnnnnnnnnnnnnnnnnnnnnnnnnnnnnnnnnnnnnnnnnnnnnnnnnnnnnnnnnnnnnnnnnnnnnnnnnnnnnnnnnnnnnnnnnnnnnnnnnnnnnnnnnnnnnnnnnnnnnnnnnnnnnnnnnnnnnnnnnnnnnnnnnnnnnnnnnnnnnnnnnnnnnnnnnnnnnnnnnnnnnnnnnnnnnnnnnnnnnnnnnnnnnnnnnnnnnnnnnnnnnnnnnnnnnnnnnnnnnnnnnnnnnnnnnnnnnnnnnnnnnnnnnnnnnnnnnnnnnnnnnnnnnnnnnnnnnnnnnnnnnnnnnnnnnnnnnnnnnnnnnnnnnnnnnnnnnnnnnnnnnnnnnnnnnnnnnnnnnnnnnnnnnnnnnnnnnnnnnnnnnnnnnnnnnnnnnnnnnnnnnnnnnnnnnnnnnnnnnnnnnnnnnnnnnnnnnnnnnnnnnnnnnnnnnnnnnnnnnnnnnnnnnnnnnnnnnnnnnnnnnnnnnnnnnnnnnnnnnnnnnnnnnnnnnnnnnnnnnnnnnnnnnnnnnnnnnnnnnnnnnnnnnnnnnnnnnnnnnnnnnnnnnnnnnnnnnnnnnnnnnnnnnnnnnnnnnnnnnnnnnnnnnnnnnnnnnnnnnnnnnnnnnnnnnnnnnnnnnnnnnnnnnnnnnnnnnnnnnnnnnnnnnnnnnnnnnnnnnnnnnnnnnnnnnnnnnnnnnnnnnnnnnnnnnnnnnnnnnnnnnnnnnnnnnnnnnnnnnnnnnnnnnnnnnnnnnnnnnnnnnnnnnnnnnnnnnnnnnnnnnnnnnnnnnnnnnnnnnnnnnnnnnnnnnnnnnnnnnnnnnnnnnnnnnnnnnnnnnnnnnnnnnnnnnnnnnnnnnnnnnnnnnnnnnnnnnnnnnnnnnnnnnnnnnnnnnnnnnnnnnnnnnnnnnnnnnnnnnnnnnnnnnnnnnnnnnnnnnnnnnnnnnnnnnnnnnnnnnnnnnnnnnnnnnnnnnnnnnnnnnnnnnnnnnnnnnnnnnnnnnnnnnnnnnnnnnnnnnnnnnnnnnnnnnnnnnnnnnnnnnnnnnnnnnnnnnnnnnnnnnnnnnnnnnnnnnnnnnnnnnnnnnnnnnnnnnnnnnnnnnnnnnnnnnnnnnnnnnnnnnnnnnnnnnnnnnnnnnnnnnnnnnnnnnnnnnnnnnnnnnnnnnnnnnnnnnnnnnnnnnnnnnnnnnnnnnnnnnnnnnnnnnnnnnnnnnnnnnnnnnnnnnnnnnnnnnnnnnnnnnnnnnnnnnnnnnnnnnnnnnnnnnnnnnnnnnnnnnnnnnnnnnnnnnnnnnnnnnnnnnnnnnnnnnnnnnnnnnnnnnnnnnnnnnnnnnnnnnnnnnnnnnnnnnnnnnnnnnnnnnnnnnnnnnnnnnnnnnnnnnnnnnnnnnnnnnnnnnnnnnnnnnnnnnnnnnnnnnnnnnnnnnnnnnnnnnnnnnnnnnnnnnnnnnnnnnnnnnnnnnnnnnnnnnnnnnnnnnnnnnnnnnnnnnnnnnnnnnnnnnnnnnnnnnnnnnnnnnnnnnnnnnnnnnnnnnnnnnnnnnnnnnnnnnnnnnnnnnnnnnnnnnnnnnnnnnnnnnnnnnnnnnnnnnnnnnnnnnnnnnnnnnnnnnnnnnnnnnnnnnnnnnnnnnnnnnnnnnnnnnnnnnnnnnnnnnnnnnnnnnnnnnnnnnnnnnnnnnnnnnnnnnnnnnnnnnnnnnnnnnnnnnnnnnnnnnnnnnnnnnnnnnnnnnnnnnnnnnnnnnnnnnnnnnnnnnnnnnnnnnnnnnnnnnnnnnnnnnnnnnnnnnnnnnnnnnnnnnnnnnnnnnnnnnnnnnnnnnnnnnnnnnnnnnnnnnnnnnnnnnnnnnnnnnnnnnnnnnnnnnnnnnnnnnnnnnnnnnnnnnnnnnnnnnnnnnnnnnnnnnnnnnnnnnnnnnnnnnnnnnnnnnnnnnnnnnnnnnnnnnnnnnnnnnnnnnnnnnnnnnnnnnnnnnnnnnnnnnnnnnnnnnnnnnnnnnnnnnnnnnnnnnnnnnnnnnnnnnnnnnnnnnnnnnnnnnnnnnnnnnnnnnnnnnnnnnnnnnnnnnnnnnnnnnnnnnnnnnnnnnnnnnnnnnnnnnnnnnnnnnnnnnnnnnnnnnnnnnnnnnnnnnnnnnnnnnnnnnnnnnnnnnnnnnnnnnnnnnnnnnnnnnnnnnnnnnnnnnnnnnnnnnnnnnnnnnnnnnnnnnnnnnnnnnnnnnnnnnnnnnnnnnnnnnnnnnnnnnnnnnnnnnnnnnnnnnnnnnnnnnnnnnnnnnnnnnnnnnnnnnnnnnnnnnnnnnnnnnnnnnnnnnnnnnnnnnnnnnnnnnnnnnnnnnnnnnnnnnnnnnnnnnnnnnnnnnnnnnnnnnnnnnnnnnnnnnnnnnnnnnnnnnnnnnnnnnnnnnnnnnnnnnnnnnnnnnnnnnnnnnnnnnnnnnnnnnnnnnnnnnnnnnnnnnnnnnnnnnnnnnnnnnnnnnnnnnnnnnnnnnnnnnnnnnnnnnnnnnnnnnnnnnnnnnnnnnnnnnnnnnnnnnnnnnnnnnnnnnnnnnnnnnnnnnnnnnnnnnnnnnnnnnnnnnnnnnnnnnnnnnnnnnnnnnnnnnnnnnnnnnnnnnnnnnnnnnnnnnnnnnnnnnnnnnnnnnnnnnnnnnnnnnnnnnnnnnnnnnnnnnnnnnnnnnnnnnnnnnnnnnnnnnnnnnnnnnnnnnnnnnnnnnnnnnnnnnnnnnnnnnnnnnnnnnnnnnnnnnnnnnnnnnnnnnnnnnnnnnnnnnnnnnnnnnnnnnnnnnnnnnnnnnnnnnnnnnnnnnnnnnnnnnnnnnnnnnnnnnnnnnnnnnnnnnnnnnnnnnnnnnnnnnnnnnnnnnnnnnnnnnnnnnnnnnnnnnnnnnnnnnnnnnnnnnnnnnnnnnnnnnnnnnnnnnnnnnnnnnnnnnnnnnnnnnnnnnnnnnnnnnnnnnnnnnnnnnnnnnnnnnnnnnnnnnnnnnnnnnnnnnnnnnnnnnnnnnnnnnnnnnnnnnnnnnnnnnnnnnnnnnnnnnnnnnnnnnnnnnnnnnnnnnnnnnnnnnnnnnnnnnnnnnnnnnnnnnnnnnnnnnnnnnnnnnnnnnnnnnnnnnnnnnnnnnnnnnnnnnnnnnnnnnnnnnnnnnnnnnnnnnnnnnnnnnnnnnnnnnnnnnnnnnnnnnnnnnnnnnnnnnnnnnnnnnnnnnnnnnnnnnnnnnnnnnnnnnnnnnnnnnnnnnnnnnnnnnnnnnnnnnnnnnnnnnnnnnnnnnnnnnnnnnnnnnnnnnnnnnnnnnnnnnnnnnnnnnnnnnnnnnnnnnnnnnnnnnnnnnnnnnnnnnnnnnnnnnnnnnnnnnnnnnnnnnnnnnnnnnnnnnnnnnnnnnnnnnnnnnnnnnnnnnnnnnnnnnnnnnnnnnnnnnnnnnnnnnnnnnnnnnnnnnnnnnnnnnnnnnnnnnnnnnnnnnnnnnnnnnnnnnnnnnnnnnnnnnnnnnnnnnnnnnnnnnnnnnnnnnnnnnnnnnnnnnnnnnnnnnnnnnnnnnnnnnnnnnnnnnnnnnnnnnnnnnnnnnnnnnnnnnnnnnnnnnnnnnnnnnnnnnnnnnnnnnnnnnnnnnnnnnnnnnnnnnnnnnnnnnnnnnnnnnnnnnnnnnnnnnnnnnnnnnnnnnnnnnnnnnnnnnnnnnnnnnnnnnnnnnnnnnnnnnnnnnnnnnnnnnnnnnnnnnnnnnnnnnnnnnnnnnnnnnnnnnnnnnnnnnnnnnnnnnnnnnnnnnnnnnnnnnnnnnnnnnnnnnnnnnnnnnnnnnnnnnnnnnnnnnnnnnnnnnnnnnnnnnnnnnnnnnnnnnnnnnnnnnnnnnnnnnnnnnnnnnnnnnnnnnnnnnnnnnnnnnnnnnnnnnnnnnnnnnnnnnnnnnnnnnnnnnnnnnnnnnnnnnnnnnnnnnnnnnnnnnnnnnnnnnnnnnnnnnnnnnnnnnnnnnnnnnnnnnnnnnnnnnnnnnnnnnnnnnnnnnnnnnnnnnnnnnnnnnnnnnnnnnnnnnnnnnnnnnnnnnnnnnnnnnnnnnnnnnnnnnnnnnnnnnnnnnnnnnnnnnnnnnnnnnnnnnnnnnnnnnnnnnnnnnnnnnnnnnnnnnnnnnnnnnnnnnnnnnnnnnnnnnnnnnnnnnnnnnnnnnnnnnnnnnnnnnnnnnnnnnnnnnnnnnnnnnnnnnnnnnnnnnnnnnnnnnnnnnnnnnnnnnnnnnnnnnnnnnnnnnnnnnnnnnnnnnnnnnnnnnnnnnnnnnnnnnnnnnnnnnnnnnnnnnnnnnnnnnnnnnnnnnnnnnnnnnnnnnnnnnnnnnnnnnnnnnnnnnnnnnnnnnnnnnnnnnnnnnnnnnnnnnnnnnnnnnnnnnnnnnnnnnnnnnnnnnnnnnnnnnnnnnnnnnnnnnnnnnnnnnnnnnnnnnnnnnnnnnnnnnnnnnnnnnnnnnnnnnnnnnnnnnnnnnnnnnnnnnnnnnnnnnnnnnnnnnnnnnnnnnnnnnnnnnnnnnnnnnnnnnnnnnnnnnnnnnnnnnnnnnnnnnnnnnnnnnnnnnnnnnnnnnnnnnnnnnnnnnnnnnnnnnnnnnnnnnnnnnnnnnnnnnnnnnnnnnnnnnnnnnnnnnnnnnnnnnnnnnnnnnnnnnnnnnnnnnnnnnnnnnnnnnnnnnnnnnnnnnnnnnnnnnnnnnnnnnnnnnnnnnnnnnnnnnnnnnnnnnnnnnnnnnnnnnnnnnnnnnnnnnnnnnnnnnnnnnnnnnnnnnnnnnnnnnnnnnnnnnnnnnnnnnnnnnnnnnnnnnnnnnnnnnnnnnnnnnnnnnnnnnnnnnnnnnnnnnnnnnnnnnnnnnnnnnnnnnnnnnnnnnnnnnnnnnnnnnnnnnnnnnnnnnnnnnnnnnnnnnnnnnnnnnnnnnnnnnnnnnnnnnnnnnnnnnnnnnnnnnnnnnnnnnnnnnnnnnnnnnnnnnnnnnnnnnnnnnnnnnnnnnnnnnnnnnnnnnnnnnnnnnnnnnnnnnnnnnnnnnnnnnnnnnnnnnnnnnnnnnnnnnnnnnnnnnnnnnnnnnnnnnnnnnnnnnnnnnnnnnnnnnnnnnnnnnnnnnnnnnnnnnnnnnnnnnnnnnnnnnnnnnnnnnnnnnnnnnnnnnnnnnnnnnnnnnnnnnnnnnnnnnnnnnnnnnnnnnnnnnnnnnnnnnnnnnnnnnnnnnnnnnnnnnnnnnnnnnnnnnnnnnnnnnnnnnnnnnnnnnnnnnnnnnnnnnnnnnnnnnnnnnnnnnnnnnnnnnnnnnnnnnnnnnnnnnnnnnnnnnnnnnnnnnnnnnnnnnnnnnnnnnnnnnnnnnnnnnnnnnnnnnnnnnnnnnnnnnnnnnnnnnnnnnnnnnnnnnnnnnnnnnnnnnnnnnnnnnnnnnnnnnnnnnnnnnnnnnnnnnnnnnnnnnnnnnnnnnnnnnnnnnnnnnnnnnnnnnnnnnnnnnnnnnnnnnnnnnnnnnnnnnnnnnnnnnnnnnnnnnnnnnnnnnnnnnnnnnnnnnnnnnnnnnnnnnnnnnnnnnnnnnnnnnnnnnnnnnnnnnnnnnnnnnnnnnnnnnnnnnnnnnnnnnnnnnnnnnnnnnnnnnnnnnnnnnnnnnnnnnnnnnnnnnnnnnnnnnnnnnnnnnnnnnnnnnnnnnnnnnnnnnnnnnnnnnnnnnnnnnnnnnnnnnnnnnnnnnnnnnnnnnnnnnnnnnnnnnnnnnnnnnnnnnnnnnnnnnnnnnnnnnnnnnnnnnnnnnnnnnnnnnnnnnnnnnnnnnnnnnnnnnnnnnnnnnnnnnnnnnnnnnnnnnnnnnnnnnnnnnnnnnnnnnnnnnnnnnnnnnnnnnnnnnnnnnnnnnnnnnnnnnnnnnnnnnnnnnnnnnnnnnnnnnnnnnnnnnnnnnnnnnnnnnnnnnnnnnnnnnnnnnnnnnnnnnnnnnnnnnnnnnnnnnnnnnnnnnnnnnnnnnnnnnnnnnnnnnnnnnnnnnnnnnnnnnnnnnnnnnnnnnnnnnnnnnnnnnnnnnnnnnnnnnnnnnnnnnnnnnnnnnnnnnnnnnnnnnnnnnnnnnnnnnnnnnnnnnnnnnnnnnnnnnnnnnnnnnnnnnnnnnnnnnnnnnnnnnnnnnnnnnnnnnnnnnnnnnnnnnnnnnnnnnnnnnnnnnnnnnnnnnnnnnnnnnnnnnnnnnnnnnnnnnnnnnnnnnnnnnnnnnnnnnnnnnnnnnnnnnnnnnnnnnnnnnnnnnnnnnnnnnnnnnnnnnnnnnnnnnnnnnnnnnnnnnnnnnnnnnnnnnnnnnnnnnnnnnnnnnnnnnnnnnnnnnnnnnnnnnnnnnnnnnnnnnnnnnnnnnnnnnnnnnnnnnnnnnnnnnnnnnnnnnnnnnnnnnnnnnnnnnnnnnnnnnnnnnnnnnnnnnnnnnnnnnnnnnnnnnnnnnnnnnnnnnnnnnnnnnnnnnnnnnnnnnnnnnnnnnnnnnnnnnnnnnnnnnnnnnnnnnnnnnnnnnnnnnnnnnnnnnnnnnnnnnnnnnnnnnnnnnnnnnnnnnnnnnnnnnnnnnnnnnnnnnnnnnnnnnnnnnnnnnnnnnnnnnnnnnnnnnnnnnnnnnnnnnnnnnnnnnnnnnnnnnnnnnnnnnnnnnnnnnnnnnnnnnnnnnnnnnnnnnnnnnnnnnnnnnnnnnnnnnnnnnnnnnnnnnnnnnnnnnnnnnnnnnnnnnnnnnnnnnnnnnnnnnnnnnnnnnnnnnnnnnnnnnnnnnnnnnnnnnnnnnnnnnnnnnnnnnnnnnnnnnnnnnnnnnnnnnnnnnnnnnnnnnnnnnnnnnnnnnnnnnnnnnnnnnnnnnnnnnnnnnnnnnnnnnnnnnnnnnnnnnnnnnnnnnnnnnnnnnnnnnnnnnnnnnnnnnnnnnnnnnnnnnnnnnnnnnnnnnnnnnnnnnnnnnnnnnnnnnnnnnnnnnnnnnnnnnnnnnnnnnnnnnnnnnnnnnnnnnnnnnnnnnnnnnnnnnnnnnnnnnnnnnnnnnnnnnnnnnnnnnnnnnnnnnnnnnnnnnnnnnnnnnnnnnnnnnnnnnnnnnnnnnnnnnnnnnnnnnnnnnnnnnnnnnnnnnnnnnnnnnnnnnnnnnnnnnnnnnnnnnnnnnnnnnnnnnnnnnnnnnnnnnnnnnnnnnnnnnnnnnnnnnnnnnnnnnnnnnnnnnnnnnnnnnnnnnnnnnnnnnnnnnnnnnnnnnnnnnnnnnnnnnnnnnnnnnnnnnnnnnnnnnnnnnnnnnnnnnnnnnnnnnnnnnnnnnnnnnnnnnnnnnnnnnnnnnnnnnnnnnnnnnnnnnnnnnnnnnnnnnnnnnnnnnnnnnnnnnnnnnnnnnnnnnnnnnnnnnnnnnnnnnnnnnnnnnnnnnnnnnnnnnnnnnnnnnnnnnnnnnnnnnnnnnnnnnnnnnnnnnnnnnnnnnnnnnnnnnnnnnnnnnnnnnnnnnnnnnnnnnnnnnnnnnnnnnnnnnnnnnnnnnnnnnnnnnnnnnnnnnnnnnnnnnnnnnnnnnnnnnnnnnnnnnnnnnnnnnnnnnnnnnnnnnnnnnnnnnnnnnnnnnnnnnnnnnnnnnnnnnnnnnnnnnnnnnnnnnnnnnnnnnnnnnnnnnnnnnnnnnnnnnnnnnnnnnnnnnnnnnnnnnnnnnnnnnnnnnnnnnnnnnnnnnnnnnnnnnnnnnnnnnnnnnnnnnnnnnnnnnnnnnnnnnnnnnnnnnnnnnnnnnnnnnnnnnnnnnnnnnnnnnnnnnnnnnnnnnnnnnnnnnnnnnnnnnnnnnnnnnnnnnnnnnnnnnnnnnnnnnnnnnnnnnnnnnnnnnnnnnnnnnnnnnnnnnnnnnnnnnnnnnnnnnnnnnnnnnnnnnnnnnnnnnnnnnnnnnnnnnnnnnnnnnnnnnnnnnnnnnnnnnnnnnnnnnnnnnnnnnnnnnnnnnnnnnnnnnnnnnnnnnnnnnnnnnnnnnnnnnnnnnnnnnnnnnnnnnnnnnnnnnnnnnnnnnnnnnnnnnnnnnnnnnnnnnnnnnnnnnnnnnnnnnnnnnnnnnnnnnnnnnnnnnnnnnnnnnnnnnnnnnnnnnnnnnnnnnnnnnnnnnnnnnnnnnnnnnnnnnnnnnnnnnnnnnnnnnnnnnnnnnnnnnnnnnnnnnnnnnnnnnnnnnnnnnnnnnnnnnnnnnnnnnnnnnnnnnnnnnnnnnnnnnnnnnnnnnnnnnnnnnnnnnnnnnnnnnnnnnnnnnnnnnnnnnnnnnnnnnnnnnnnnnnnnnnnnnnnnnnnnnnnnnnnnnnnnnnnnnnnnnnnnnnnnnnnnnnnnnnnnnnnnnnnnnnnnnnnnnnnnnnnnnnnnnnnnnnnnnnnnnnnnnnnnnnnnnnnnnnnnnnnnnnnnnnnnnnnnnnnnnnnnnnnnnnnnnnnnnnnnnnnnnnnnnnnnnnnnnnnnnnnnnnnnnnnnnnnnnnnnnnnnnnnnnnnnnnnnnnnnnnnnnnnnnnnnnnnnnnnnnnnnnnnnnnnnnnnnnnnnnnnnnnnnnnnnnnnnnnnnnnnnnnnnnnnnnnnnnnnnnnnnnnnnnnnnnnnnnnnnnnnnnnnnnnnnnnnnnnnnnnnnnnnnnnnnnnnnnnnnnnnnnnnnnnnnnnnnnnnnnnnnnnnnnnnnnnnnnnnnnnnnnnnnnnnnnnnnnnnnnnnnnnnnnnnnnnnnnnnnnnnnnnnnnnnnnnnnnnnnnnnnnnnnnnnnnnnnnnnnnnnnnnnnnnnnnnnnnnnnnnnnnnnnnnnnnnnnnnnnnnnnnnnnnnnnnnnnnnnnnnnnnnnnnnnnnnnnnnnnnnnnnnnnnnnnnnnnnnnnnnnnnnnnnnnnnnnnnnnnnnnnnnnnnnnnnnnnnnnnnnnnnnnnnnnnnnnnnnnnnnnnnnnnnnnnnnnnnnnnnnnnnnnnnnnnnnnnnnnnnnnnnnnnnnnnnnnnnnnnnnnnnnnnnnnnnnnnnnnnnnnnnnnnnnnnnnnnnnnnnnnnnnnnnnnnnnnnnnnnnnnnnnnnnnnnnnnnnnnnnnnnnnnnnnnnnnnnnnnnnnnnnnnnnnnnnnnnnnnnnnnnnnnnnnnnnnnnnnnnnnnnnnnnnnnnnnnnnnnnnnnnnnnnnnnnnnnnnnnnnnnnnnnnnnnnnnnnnnnnnnnnnnnnnnnnnnnnnnnnnnnnnnnnnnnnnnnnnnnnnnnnnnnnnnnnnnnnnnnnnnnnnnnnnnnnnnnnnnnnnnnnnnnnnnnnnnnnnnnnnnnnnnnnnnnnnnnnnnnnnnnnnnnnnnnnnnnnnnnnnnnnnnnnnnnnnnnnnnnnnnnnnnnnnnnnnnnnnnnnnnnnnnnnnnnnnnnnnnnnnnnnnnnnnnnnnnnnnnnnnnnnnnnnnnnnnnnnnnnnnnnnnnnnnnnnnnnnnnnnnnnnnnnnnnnnnnnnnnnnnnnnnnnnnnnnnnnnnnnnnnnnnnnnnnnnnnnnnnnnnnnnnnnnnnnnnnnnnnnnnnnnnnnnnnnnnnnnnnnnnnnnnnnnnnnnnnnnnnnnnnnnnnnnnnnnnnnnnnnnnnnnnnnnnnnnnnnnnnnnnnnnnnnnnnnnnnnnnnnnnnnnnnnnnnnnnnnnnnnnnnnnnnnnnnnnnnnnnnnnnnnnnnnnnnnnnnnnnnnnnnnnnnnnnnnnnnnnnnnnnnnnnnnnnnnnnnnnnnnnnnnnnnnnnnnnnnnnnnnnnnnnnnnnnnnnnnnnnnnnnnnnnnnnnnnnnnnnnnnnnnnnnnnnnnnnnnnnnnnnnnnnnnnnnnnnnnnnnnnnnnnnnnnnnnnnnnnnnnnnnnnnnnnnnnnnnnnnnnnnnnnnnnnnnnnnnnnnnnnnnnnnnnnnnnnnnnnnnnnnnnnnnnnnnnnnnnnnnnnnnnnnnnnnnnnnnnnnnnnnnnnnnnnnnnnnnnnnnnnnnnnnnnnnnnnnnnnnnnnnnnnnnnnnnnnnnnnnnnnnnnnnnnnnnnnnnnnnnnnnnnnnnnnnnnnnnnnnnnnnnnnnnnnnnnnnnnnnnnnnnnnnnnnnnnnnnnnnnnnnnnnnnnnnnnnnnnnnnnnnnnnnnnnnnnnnnnnnnnnnnnnnnnnnnnnnnnnnnnnnnnnnnnnnnnnnnnnnnnnnnnnnnnnnnnnnnnnnnnnnnnnnnnnnnnnnnnnnnnnnnnnnnnnnnnnnnnnnnnnnnnnnnnnnnnnnnnnnnnnnnnnnnnnnnnnnnnnnnnnnnnnnnnnnnnnnnnnnnnnnnnnnnnnnnnnnnnnnnnnnnnnnnnnnnnnnnnnnnnnnnnnnnnnnnnnnnnnnnnnnnnnnnnnnnnnnnnnnnnnnnnnnnnnnnnnnnnnnnnnnnnnnnnnnnnnnnnnnnnnnnnnnnnnnnnnnnnnnnnnnnnnnnnnnnnnnnnnnnnnnnnnnnnnnnnnnnnnnnnnnnnnnnnnnnnnnnnnnnnnnnnnnnnnnnnnnnnnnnnnnnnnnnnnnnnnnnnnnnnnnnnnnnnnnnnnnnnnnnnnnnnnnnnnnnnnnnnnnnnnnnnnnnnnnnnnnnnnnnnnnnnnnnnnnnnnnnnnnnnnnnnnnnnnnnnnnnnnnnnnnnnnnnnnnnnnnnnnnnnnnnnnnnnnnnnnnnnnnnnnnnnnnnnnnnnnnnnnnnnnnnnnnnnnnnnnnnnnnnnnnnnnnnnnnnnnnnnnnnnnnnnnnnnnnnnnnnnnnnnnnnnnnnnnnnnnnnnnnnnnnnnnnnnnnnnnnnnnnnnnnnnnnnnnnnnnnnnnnnnnnnnnnnnnnnnnnnnnnnnnnnnnnnnnnnnnnnnnnnnnnnnnnnnnnnnnnnnnnnnnnnnnnnnnnnnnnnnnnnnnnnnnnnnnnnnnnnnnnnnnnnnnnnnnnnnnnnnnnnnnnnnnnnnnnnnnnnnnnnnnnnnnnnnnnnnnnnnnnnnnnnnnnnnnnnnnnnnnnnnnnnnnnnnnnnnnnnnnnnnnnnnnnnnnnnnnnnnnnnnnnnnnnnnnnnnnnnnnnnnnnnnnnnnnnnnnnnnnnnnnnnnnnnnnnnnnnnnnnnnnnnnnnnnnnnnnnnnnnnnnnnnnnnnnnnnnnnnnnnnnnnnnnnnnnnnnnnnnnnnnnnnnnnnnnnnnnnnnnnnnnnnnnnnnnnnnnnnnnnnnnnnnnnnnnnnnnnnnnnnnnnnnnnnnnnnnnnnnnnnnnnnnnnnnnnnnnnnnnnnnnnnnnnnnnnnnnnnnnnnnnnnnnnnnnnnnnnnnnnnnnnnnnnnnnnnnnnnnnnnnnnnnnnnnnnnnnnnnnnnnnnnnnnnnnnnnnnnnnnnnnnnnnnnnnnnnnnnnnnnnnnnnnnnnnnnnnnnnnnnnnnnnnnnnnnnnnnnnnnnnnnnnnnnnnnnnnnnnnnnnnnnnnnnnnnnnnnnnnnnnnnnnnnnnnnnnnnnnnnnnnnnnnnnnnnnnnnnnnnnnnnnnnnnnnnnnnnnnnnnnnnnnnnnnnnnnnnnnnnnnnnnnnnnnnnnnnnnnnnnnnnnnnnnnnnnnnnnnnnnnnnnnnnnnnnnnnnnnnnnnnnnnnnnnnnnnnnnnnnnnnnnnnnnnnnnnnnnnnnnnnnnnnnnnnnnnnnnnnnnnnnnnnnnnnnnnnnnnnnnnnnnnnnnnnnnnnnnnnnnnnnnnnnnnnnnnnnnnnnnnnnnnnnnnnnnnnnnnnnnnnnnnnnnnnnnnnnnnnnnnnnnnnnnnnnnnnnnnnnnnnnnnnnnnnnnnnnnnnnnnnnnnnnnnnnnnnnnnnnnnnnnnnnnnnnnnnnnnnnnnnnnnnnnnnnnnnnnnnnnnnnnnnnnnnnnnnnnnnnnnnnnnnnnnnnnnnnnnnnnnnnnnnnnnnnnnnnnnnnnnnnnnnnnnnnnnnnnnnnnnnnnnnnnnnnnnnnnnnnnnnnnnnnnnnnnnnnnnnnnnnnnnnnnnnnnnnnnnnnnnnnnnnnnnnnnnnnnnnnnnnnnnnnnnnnnnnnnnnnnnnnnnnnnnnnnnnnnnnnnnnnnnnnnnnnnnnnnnnnnnnnnnnnnnnnnnnnnnnnnnnnnnnnnnnnnnnnnnnnnnnnnnnnnnnnnnnnnnnnnnnnnnnnnnnnnnnnnnnnnnnnnnnnnnnnnnnnnnnnnnnnnnnnnnnnnnnnnnnnnnnnnnnnnnnnnnnnnnnnnnnnnnnnnnnnnnnnnnnnnnnnnnnnnnnnnnnnnnnnnnnnnnnnnnnnnnnnnnnnnnnnnnnnnnnnnnnnnnnnnnnnnnnnnnnnnnnnnnnnnnnnnnnnnnnnnnnnnnnnnnnnnnnnnnnnnnnnnnnnnnnnnnnnnnnnnnnnnnnnnnnnnnnnnnnnnnnnnnnnnnnnnnnnnnnnnnnnnnnnnnnnnnnnnnnnnnnnnnnnnnnnnnnnnnnnnnnnnnnnnnnnnnnnnnnnnnnnnnnnnnnnnnnnnnnnnnnnnnnnnnnnnnnnnnnnnnnnnnnnnnnnnnnnnnnnnnnnnnnnnnnnnnnnnnnnnnnnnnnnnnnnnnnnnnnnnnnnnnnnnnnnnnnnnnnnnnnnnnnnnnnnnnnnnnnnnnnnnnnnnnnnnnnnnnnnnnnnnnnnnnnnnnnnnnnnnnnnnnnnnnnnnnnnnnnnnnnnnnnnnnnnnnnnnnnnnnnnnnnnnnnnnnnnnnnnnnnnnnnnnnnnnnnnnnnnnnnnnnnnnnnnnnnnnnnnnnnnnnnnnnnnnnnnnnnnnnnnnnnnnnnnnnnnnnnnnnnnnnnnnnnnnnnnnnnnnnnnnnnnnnnnnnnnnnnnnnnnnnnnnnnnnnnnnnnnnnnnnnnnnnnnnnnnnnnnnnnnnnnnnnnnnnnnnnnnnnnnnnnnnnnnnnnnnnnnnnnnnnnnnnnnnnnnnnnnnnnnnnnnnnnnnnnnnnnnnnnnnnnnnnnnnnnnnnnnnnnnnnnnnnnnnnnnnnnnnnnnnnnnnnnnnnnnnnnnnnnnnnnnnnnnnnnnnnnnnnnnnnnnnnnnnnnnnnnnnnnnnnnnnnnnnnnnnnnnnnnnnnnnnnnnnnnnnnnnnnnnnnnnnnnnnnnnnnnnnnnnnnnnnnnnnnnnnnnnnnnnnnnnnnnnnnnnnnnnnnnnnnnnnnnnnnnnnnnnnnnnnnnnnnnnnnnnnnnnnnnnnnnnnnnnnnnnnnnnnnnnnnnnnnnnnnnnnnnnnnnnnnnnnnnnnnnnnnnnnnnnnnnnnnnnnnnnnnnnnnnnnnnnnnnnnnnnnnnnnnnnnnnnnnnnnnnnnnnnnnnnnnnnnnnnnnnnnnnnnnnnnnnnnnnnnnnnnnnnnnnnnnnnnnnnnnnnnnnnnnnnnnnnnnnnnnnnnnnnnnnnnnnnnnnnnnnnnnnnnnnnnnnnnnnnnnnnnnnnnnnnnnnnnnnnnnnnnnnnnnnnnnnnnnnnnnnnnnnnnnnnnnnnnnnnnnnnnnnnnnnnnnnnnnnnnnnnnnnnnnnnnnnnnnnnnnnnnnnnnnnnnnnnnnnnnnnnnnnnnnnnnnnnnnnnnnnnnnnnnnnnnnnnnnnnnnnnnnnnnnnnnnnnnnnnnnnnnnnnnnnnnnnnnnnnnnnnnnnnnnnnnnnnnnnnnnnnnnnnnnnnnnnnnnnnnnnnnnnnnnnnnnnnnnnnnnnnnnnnnnnnnnnnnnnnnnnnnnnnnnnnnnnnnnnnnnnnnnnnnnnnnnnnnnnnnnnnnnnnnnnnnnnnnnnnnnnnnnnnnnnnnnnnnnnnnnnnnnnnnnnnnnnnnnnnnnnnnnnnnnnnnnnnnnnnnnnnnnnnnnnnnnnnnnnnnnnnnnnnnnnnnnnnnnnnnnnnnnnnnnnnnnnnnnnnnnnnnnnnnnnnnnnnnnnnnnnnnnnnnnnnnnnnnnnnnnnnnnnnnnnnnnnnnnnnnnnnnnnnnnnnnnnnnnnnnnnnnnnnnnnnnnnnnnnnnnnnnnnnnnnnnnnnnnnnnnnnnnnnnnnnnnnnnnnnnnnnnnnnnnnnnnnnnnnnnnnnnnnnnnnnnnnnnnnnnnnnnnnnnnnnnnnnnnnnnnnnnnnnnnnnnnnnnnnnnnnnnnnnnnnnnnnnnnnnnnnnnnnnnnnnnnnnnnnnnnnnnnnnnnnnnnnnnnnnnnnnnnnnnnnnnnnnnnnnnnnnnnnnnnnnnnnnnnnnnnnnnnnnnnnnnnnnnnnnnnnnnnnnnnnnnnnnnnnnnnnnnnnnnnnnnnnnnnnnnnnnnnnnnnnnnnnnnnnnnnnnnnnnnnnnnnnnnnnnnnnnnnnnnnnnnnnnnnnnnnnnnnnnnnnnnnnnnnnnnnnnnnnnnnnnnnnnnnnnnnnnnnnnnnnnnnnnnnnnnnnnnnnnnnnnnnnnnnnnnnnnnnnnnnnnnnnnnnnnnnnnnnnnnnnnnnnnnnnnnnnnnnnnnnnnnnnnnnnnnnnnnnnnnnnnnnnnnnnnnnnnnnnnnnnnnnnnnnnnnnnnnnnnnnnnnnnnnnnnnnnnnnnnnnnnnnnnnnnnnnnnnnnnnnnnnnnnnnnnnnnnnnnnnnnnnnnnnnnnnnnnnnnnnnnnnnnnnnnnnnnnnnnnnnnnnnnnnnnnnnnnnnnnnnnnnnnnnnnnnnnnnnnnnnnnnnnnnnnnnnnnnnnnnnnnnnnnnnnnnnnnnnnnnnnnnnnnnnnnnnnnnnnnnnnnnnnnnnnnnnnnnnnnnnnnnnnnnnnnnnnnnnnnnnnnnnnnnnnnnnnnnnnnnnnnnnnnnnnnnnnnnnnnnnnnnnnnnnnnnnnnnnnnnnnnnnnnnnnnnnnnnnnnnnnnnnnnnnnnnnnnnnnnnnnnnnnnnnnnnnnnnnnnnnnnnnnnnnnnnnnnnnnnnnnnnnnnnnnnnnnnnnnnnnnnnnnnnnnnnnnnnnnnnnnnnnnnnnnnnnnnnnnnnnnnnnnnnnnnnnnnnnnnnnnnnnnnnnnnnnnnnnnnnnnnnnnnnnnnnnnnnnnnnnnnnnnnnnnnnnnnnnnnnnnnnnnnnnnnnnnnnnnnnnnnnnnnnnnnnnnnnnnnnnnnnnnnnnnnnnnnnnnnnnnnnnnnnnnnnnnnnnnnnnnnnnnnnnnnnnnnnnnnnnnnnnnnnnnnnnnnnnnnnnnnnnnnnnnnnnnnnnnnnnnnnnnnnnnnnnnnnnnnnnnnnnnnnnnnnnnnnnnnnnnnnnnnnnnnnnnnnnnnnnnnnnnnnnnnnnnnnnnnnnnnnnnnnnnnnnnnnnnnnnnnnnnnnnnnnnnnnnnnnnnnnnnnnnnnnnnnnnnnnnnnnnnnnnnnnnnnnnnnnnnnnnnnnnnnnnnnnnnnnnnnnnnnnnnnnnnnnnnnnnnnnnnnnnnnnnnnnnnnnnnnnnnnnnnnnnnnnnnnnnnnnnnnnnnnnnnnnnnnnnnnnnnnnnnnnnnnnnnnnnnnnnnnnnnnnnnnnnnnnnnnnnnnnnnnnnnnnnnnnnnnnnnnnnnnnnnnnnnnnnnnnnnnnnnnnnnnnnnnnnnnnnnnnnnnnnnnnnnnnnnnnnnnnnnnnnnnnnnnnnnnnnnnnnnnnnnnnnnnnnnnnnnnnnnnnnnnnnnnnnnnnnnnnnnnnnnnnnnnnnnnnnnnnnnnnnnnnnnnnnnnnnnnnnnnnnnnnnnnnnnnnnnnnnnnnnnnnnnnnnnnnnnnnnnnnnnnnnnnnnnnnnnnnnnnnnnnnnnnnnnnnnnnnnnnnnnnnnnnnnnnnnnnnnnnnnnnnnnnnnnnnnnnnnnnnnnnnnnnnnnnnnnnnnnnnnnnnnnnnnnnnnnnnnnnnnnnnnnnnnnnnnnnnnnnnnnnnnnnnnnnnnnnnnnnnnnnnnnnnnnnnnnnnnnnnnnnnnnnnnnnnnnnnnnnnnnnnnnnnnnnnnnnnnnnnnnnnnnnnnnnnnnnnnnnnnnnnnnnnnnnnnnnnnnnnnnnnnnnnnnnnnnnnnnnnnnnnnnnnnnnnnnnnnnnnnnnnnnnnnnnnnnnnnnnnnnnnnnnnnnnnnnnnnnnnnnnnnnnnnnnnnnnnnnnnnnnnnnnnnnnnnnnnnnnnnnnnnnnnnnnnnnnnnnnnnnnnnnnnnnnnnnnnnnnnnnnnnnnnnnnnnnnnnnnnnnnnnnnnnnnnnnnnnnnnnnnnnnnnnnnnnnnnnnnnnnnnnnnnnnnnnnnnnnnnnnnnnnnnnnnnnnnnnnnnnnnnnnnnnnnnnnnnnnnnnnnnnnnnnnnnnnnnnnnnnnnnnnnnnnnnnnnnnnnnnnnnnnnnnnnnnnnnnnnnnnnnnnnnnnnnnnnnnnnnnnnnnnnnnnnnnnnnnnnnnnnnnnnnnnnnnnnnnnnnnnnnnnnnnnnnnnnnnnnnnnnnnnnnnnnnnnnnnnnnnnnnnnnnnnnnnnnnnnnnnnnnnnnnnnnnnnnnnnnnnnnnnnnnnnnnnnnnnnnnnnnnnnnnnnnnnnnnnnnnnnnnnnnnnnnnnnnnnnnnnnnnnnnnnnnnnnnnnnnnnnnnnnnnnnnnnnnnnnnnnnnnnnnnnnnnnnnnnnnnnnnnnnnnnnnnnnnnnnnnnnnnnnnnnnnnnnnnnnnnnnnnnnnnnnnnnnnnnnnnnnnnnnnnnnnnnnnnnnnnnnnnnnnnnnnnnnnnnnnnnnnnnnnnnnnnnnnnnnnnnnnnnnnnnnnnnnnnnnnnnnnnnnnnnnnnnnnnnnnnnnnnnnnnnnnnnnnnnnnnnnnnnnnnnnnnnnnnnnnnnnnnnnnnnnnnnnnnnnnnnnnnnnnnnnnnnnnnnnnnnnnnnnnnnnnnnnnnnnnnnnnnnnnnnnnnnnnnnnnnnnnnnnnnnnnnnnnnnnnnnnnnnnnnnnnnnnnnnnnnnnnnnnnnnnnnnnnnnnnnnnnnnnnnnnnnnnnnnnnnnnnnnnnnnnnnnnnnnnnnnnnnnnnnnnnnnnnnnnnnnnnnnnnnnnnnnnnnnnnnnnnnnnnnnnnnnnnnnnnnnnnnnnnnnnnnnnnnnnnnnnnnnnnnnnnnnnnnnnnnnnnnnnnnnnnnnnnnnnnnnnnnnnnnnnnnnnnnnnnnnnnnnnnnnnnnnnnnnnnnnnnnnnnnnnnnnnnnnnnnnnnnnnnnnnnnnnnnnnnnnnnnnnnnnnnnnnnnnnnnnnnnnnnnnnnnnnnnnnnnnnnnnnnnnnnnnnnnnnnnnnnnnnnnnnnnnnnnnnnnnnnnnnnnnnnnnnnnnnnnnnnnnnnnnnnnnnnnnnnnnnnnnnnnnnnnnnnnnnnnnnnnnnnnnnnnnnnnnnnnnnnnnnnnnnnnnnnnnnnnnnnnnnnnnnnnnnnnnnnnnnnnnnnnnnnnnnnnnnnnnnnnnnnnnnnnnnnnnnnnnnnnnnnnnnnnnnnnnnnnnnnnnnnnnnnnnnnnnnnnnnnnnnnnnnnnnnnnnnnnnnnnnnnnnnnnnnnnnnnnnnnnnnnnnnnnnnnnnnnnnnnnnnnnnnnnnnnnnnnnnnnnnnnnnnnnnnnnnnnnnnnnnnnnnnnnnnnnnnnnnnnnnnnnnnnnnnnnnnnnnnnnnnnnnnnnnnnnnnnnnnnnnnnnnnnnnnnnnnnnnnnnnnnnnnnnnnnnnnnnnnnnnnnnnnnnnnnnnnnnnnnnnnnnnnnnnnnnnnnnnnnnnnnnnnnnnnnnnnnnnnnnnnnnnnnnnnnnnnnnnnnnnnnnnnnnnnnnnnnnnnnnnnnnnnnnnnnnnnnnnnnnnnnnnnnnnnnnnnnnnnnnnnnnnnnnnnnnnnnnnnnnnnnnnnnnnnnnnnnnnnnnnnnnnnnnnnnnnnnnnnnnnnnnnnnnnnnnnnnnnnnnnnnnnnnnnnnnnnnnnnnnnnnnnnnnnnnnnnnnnnnnnnnnnnnnnnnnnnnnnnnnnnnnnnnnnnnnnnnnnnnnnnnnnnnnnnnnnnnnnnnnnnnnnnnnnnnnnnnnnnnnnnnnnnnnnnnnnnnnnnnnnnnnnnnnnnnnnnnnnnnnnnnnnnnnnnnnnnnnnnnnnnnnnnnnnnnnnnnnnnnnnnnnnnnnnnnnnnnnnnnnnnnnnnnnnnnnnnnnnnnnnnnnnnnnnnnnnnnnnnnnnnnnnnnnnnnnnnnnnnnnnnnnnnnnnnnnnnnnnnnnnnnnnnnnnnnnnnnnnnnnnnnnnnnnnnnnnnnnnnnnnnnnnnnnnnnnnnnnnnnnnnnnnnnnnnnnnnnnnnnnnnnnnnnnnnnnnnnnnnnnnnnnnnnnnnnnnnnnnnnnnnnnnnnnnnnnnnnnnnnnnnnnnnnnnnnnnnnnnnnnnnnnnnnnnnnnnnnnnnnnnnnnnnnnnnnnnnnnnnnnnnnnnnnnnnnnnnnnnnnnnnnnnnnnnnnnnnnnnnnnnnnnnnnnnnnnnnnnnnnnnnnnnnnnnnnnnnnnnnnnnnnnnnnnnnnnnnnnnnnnnnnnnnnnnnnnnnnnnnnnnnnnnnnnnnnnnnnnnnnnnnnnnnnnnnnnnnnnnnnnnnnnnnnnnnnnnnnnnnnnnnnnnnnnnnnnnnnnnnnnnnnnnnnnnnnnnnnnnnnnnnnnnnnnnnnnnnnnnnnnnnnnnnnnnnnnnnnnnnnnnnnnnnnnnnnnnnnnnnnnnnnnnnnnnnnnnnnnnnnnnnnnnnnnnnnnnnnnnnnnnnnnnnnnnnnnnnnnnnnnnnnnnnnnnnnnnnnnnnnnnnnnnnnnnnnnnnnnnnnnnnnnnnnnnnnnnnnnnnnnnnnnnnnnnnnnnnnnnnnnnnnnnnnnnnnnnnnnnnnnnnnnnnnnnnnnnnnnnnnnnnnnnnnnnnnnnnnnnnnnnnnnnnnnnnnnnnnnnnnnnnnnnnnnnnnnnnnnnnnnnnnnnnnnnnnnnnnnnnnnnnnnnnnnnnnnnnnnnnnnnnnnnnnnnnnnnnnnnnnnnnnnnnnnnnnnnnnnnnnnnnnnnnnnnnnnnnnnnnnnnnnnnnnnnnnnnnnnnnnnnnnnnnnnnnnnnnnnnnnnnnnnnnnnnnnnnnnnnnnnnnnnnnnnnnnnnnnnnnnnnnnnnnnnnnnnnnnnnnnnnnnnnnnnnnnnnnnnnnnnnnnnnnnnnnnnnnnnnnnnnnnnnnnnnnnnnnnnnnnnnnnnnnnnnnnnnnnnnnnnnnnnnnnnnnnnnnnnnnnnnnnnnnnnnnnnnnnnnnnnnnnnnnnnnnnnnnnnnnnnnnnnnnnnnnnnnnnnnnnnnnnnnnnnnnnnnnnnnnnnnnnnnnnnnnnnnnnnnnnnnnnnnnnnnnnnnnnnnnnnnnnnnnnnnnnnnnnnnnnnnnnnnnnnnnnnnnnnnnnnnnnnnnnnnnnnnnnnnnnnnnnnnnnnnnnnnnnnnnnnnnnnnnnnnnnnnnnnnnnnnnnnnnnnnnnnnnnnnnnnnnnnnnnnnnnnnnnnnnnnnnnnnnnnnnnnnnnnnnnnnnnnnnnnnnnnnnnnnnnnnnnnnnnnnnnnnnnnnnnnnnnnnnnnnnnnnnnnnnnnnnnnnnnnnnnnnnnnnnnnnnnnnnnnnnnnnnnnnnnnnnnnnnnnnnnnnnnnnnnnnnnnnnnnnnnnnnnnnnnnnnnnnnnnnnnnnnnnnnnnnnnnnnnnnnnnnnnnnnnnnnnnnnnnnnnnnnnnnnnnnnnnnnnnnnnnnnnnnnnnnnnnnnnnnnnnnnnnnnnnnnnnnnnnnnnnnnnnnnnnnnnnnnnnnnnnnnnnnnnnnnnnnnnnnnnnnnnnnnnnnnnnnnnnnnnnnnnnnnnnnnnnnnnnnnnnnnnnnnnnnnnnnnnnnnnnnnnnnnnnnnnnnnnnnnnnnnnnnnnnnnnnnnnnnnnnnnnnnnnnnnnnnnnnnnnnnnnnnnnnnnnnnnnnnnnnnnnnnnnnnnnnnnnnnnnnnnnnnnnnnnnnnnnnnnnnnnnnnnnnnnnnnnnnnnnnnnnnnnnnnnnnnnnnnnnnnnnnnnnnnnnnnnnnnnnnnnnnnnnnnnnnnnnnnnnnnnnnnnnnnnnnnnnnnnnnnnnnnnnnnnnnnnnnnnnnnnnnnnnnnnnnnnnnnnnnnnnnnnnnnnnnnnnnnnnnnnnnnnnnnnnnnnnnnnnnnnnnnnnnnnnnnnnnnnnnnnnnnnnnnnnnnnnnnnnnnnnnnnnnnnnnnnnnnnnnnnnnnnnnnnnnnnnnnnnnnnnnnnnnnnnnnnnnnnnnnnnnnnnnnnnnnnnnnnnnnnnnnnnnnnnnnnnnnnnnnnnnnnnnnnnnnnnnnnnnnnnnnnnnnnnnnnnnnnnnnnnnnnnnnnnnnnnnnnnnnnnnnnnnnnnnnnnnnnnnnnnnnnnnnnnnnnnnnnnnnnnnnnnnnnnnnnnnnnnnnnnnnnnnnnnnnnnnnnnnnnnnnnnnnnnnnnnnnnnnnnnnnnnnnnnnnnnnnnnnnnnnnnnnnnnnnnnnnnnnnnnnnnnnnnnnnnnnnnnnnnnnnnnnnnnnnnnnnnnnnnnnnnnnnnnnnnnnnnnnnnnnnnnnnnnnnnnnnnnnnnnnnnnnnnnnnnnnnnnnnnnnnnnnnnnnnnnnnnnnnnnnnnnnnnnnnnnnnnnnnnnnnnnnnnnnnnnnnnnnnnnnnnnnnnnnnnnnnnnnnnnnnnnnnnnnnnnnnnnnnnnnnnnnnnnnnnnnnnnnnnnnnnnnnnnnnnnnnnnnnnnnnnnnnnnnnnnnnnnnnnnnnnnnnnnnnnnnnnnnnnnnnnnnnnnnnnnnnnnnnnnnnnnnnnnnnnnnnnnnnnnnnnnnnnnnnnnnnnnnnnnnnnnnnnnnnnnnnnnnnnnnnnnnnnnnnnnnnnnnnnnnnnnnnnnnnnnnnnnnnnnnnnnnnnnnnnnnnnnnnnnnnnnnnnnnnnnnnnnnnnnnnnnnnnnnnnnnnnnnnnnnnnnnnnnnnnnnnnnnnnnnnnnnnnnnnnnnnnnnnnnnnnnnnnnnnnnnnnnnnnnnnnnnnnnnnnnnnnnnnnnnnnnnnnnnnnnnnnnnnnnnnnnnnnnnnnnnnnnnnnnnnnnnnnnnnnnnnnnnnnnnnnnnnnnnnnnnnnnnnnnnnnnnnnnnnnnnnnnnnnnnnnnnnnnnnnnnnnnnnnnnnnnnnnnnnnnnnnnnnnnnnnnnnnnnnnnnnnnnnnnnnnnnnnnnnnnnnnnnnnnnnnnnnnnnnnnnnnnnnnnnnnnnnnnnnnnnnnnnnnnnnnnnnnnnnnnnnnnnnnnnnnnnnnnnnnnnnnnnnnnnnnnnnnnnnnnnnnnnnnnnnnnnnnnnnnnnnnnnnnnnnnnnnnnnnnnnnnnnnnnnnnnnnnnnnnnnnnnnnnnnnnnnnnnnnnnnnnnnnnnnnnnnnnnnnnnnnnnnnnnnnnnnnnnnnnnnnnnnnnnnnnnnnnnnnnnnnnnnnnnnnnnnnnnnnnnnnnnnnnnnnnnnnnnnnnnnnnnnnnnnnnnnnnnnnnnnnnnnnnnnnnnnnnnnnnnnnnnnnnnnnnnnnnnnnnnnnnnnnnnnnnnnnnnnnnnnnnnnnnnnnnnnnnnnnnnnnnnnnnnnnnnnnnnnnnnnnnnnnnnnnnnnnnnnnnnnnnnnnnnnnnnnnnnnnnnnnnnnnnnnnnnnnnnnnnnnnnnnnnnnnnnnnnnnnnnnnnnnnnnnnnnnnnnnnnnnnnnnnnnnnnnnnnnnnnnnnnnnnnnnnnnnnnnnnnnnnnnnnnnnnnnnnnnnnnnnnnnnnnnnnnnnnnnnnnnnnnnnnnnnnnnnnnnnnnnnnnnnnnnnnnnnnnnnnnnnnnnnnnnnnnnnnnnnnnnnnnnnnnnnnnnnnnnnnnnnnnnnnnnnnnnnnnnnnnnnnnnnnnnnnnnnnnnnnnnnnnnnnnnnnnnnnnnnnnnnnnnnnnnnnnnnnnnnnnnnnnnnnnnnnnnnnnnnnnnnnnnnnnnnnnnnnnnnnnnnnnnnnnnnnnnnnnnnnnnnnnnnnnnnnnnnnnnnnnnnnnnnnnnnnnnnnnnnnnnnnnnnnnnnnnnnnnnnnnnnnnnnnnnnnnnnnnnnnnnnnnnnnnnnnnnnnnnnnnnnnnnnnnnnnnnnnnnnnnnnnnnnnnnnnnnnnnnnnnnnnnnnnnnnnnnnnnnnnnnnnnnnnnnnnnnnnnnnnnnnnnnnnnnnnnnnnnnnnnnnnnnnnnnnnnnnnnnnnnnnnnnnnnnnnnnnnnnnnnnnnnnnnnnnnnnnnnnnnnnnnnnnnnnnnnnnnnnnnnnnnnnnnnnnnnnnnnnnnnnnnnnnnnnnnnnnnnnnnnnnnnnnnnnnnnnnnnnnnnnnnnnnnnnnnnnnnnnnnnnnnnnnnnnnnnnnnnnnnnnnnnnnnnnnnnnnnnnnnnnnnnnnnnnnnnnnnnnnnnnnnnnnnnnnnnnnnnnnnnnnnnnnnnnnnnnnnnnnnnnnnnnnnnnnnnnnnnnnnnnnnnnnnnnnnnnnnnnnnnnnnnnnnnnnnnnnnnnnnnnnnnnnnnnnnnnnnnnnnnnnnnnnnnnnnnnnnnnnnnnnnnnnnnnnnnnnnnnnnnnnnnnnnnnnnnnnnnnnnnnnnnnnnnnnnnnnnnnnnnnnnnnnnnnnnnnnnnnnnnnnnnnnnnnnnnnnnnnnnnnnnnnnnnnnnnnnnnnnnnnnnnnnnnnnnnnnnnnnnnnnnnnnnnnnnnnnnnnnnnnnnnnnnnnnnnnnnnnnnnnnnnnnnnnnnnnnnnnnnnnnnnnnnnnnnnnnnnnnnnnnnnnnnnnnnnnnnnnnnnnnnnnnnnnnnnnnnnnnnnnnnnnnnnnnnnnnnnnnnnnnnnnnnnnnnnnnnnnnnnnnnnnnnnnnnnnnnnnnnnnnnnnnnnnnnnnnnnnnnnnnnnnnnnnnnnnnnnnnnnnnnnnnnnnnnnnnnnnnnnnnnnnnnnnnnnnnnnnnnnnnnnnnnnnnnnnnnnnnnnnnnnnnnnnnnnnnnnnnnnnnnnnnnnnnnnnnnnnnnnnnnnnnnnnnnnnnnnnnnnnnnnnnnnnnnnnnnnnnnnnnnnnnnnnnnnnnnnnnnnnnnnnnnnnnnnnnnnnnnnnnnnnnnnnnnnnnnnnnnnnnnnnnnnnnnnnnnnnnnnnnnnnnnnnnnnnnnnnnnnnnnnnnnnnnnnnnnnnnnnnnnnnnnnnnnnnnnnnnnnnnnnnnnnnnnnnnnnnnnnnnnnnnnnnnnnnnnnnnnnnnnnnnnnnnnnnnnnnnnnnnnnnnnnnnnnnnnnnnnnnnnnnnnnnnnnnnnnnnnnnnnnnnnnnnnnnnnnnnnnnnnnnnnnnnnnnnnnnnnnnnnnnnnnnnnnnnnnnnnnnnnnnnnnnnnnnnnnnnnnnnnnnnnnnnnnnnnnnnnnnnnnnnnnnnnnnnnnnnnnnnnnnnnnnnnnnnnnnnnnnnnnnnnnnnnnnnnnnnnnnnnnnnnnnnnnnnnnnnnnnnnnnnnnnnnnnnnnnnnnnnnnnnnnnnnnnnnnnnnnnnnnnnnnnnnnnnnnnnnnnnnnnnnnnnnnnnnnnnnnnnnnnnnnnnnnnnnnnnnnnnnnnnnnnnnnnnnnnnnnnnnnnnnnnnnnnnnnnnnnnnnnnnnnnnnnnnnnnnnnnnnnnnnnnnnnnnnnnnnnnnnnnnnnnnnnnnnnnnnnnnnnnnnnnnnnnnnnnnnnnnnnnnnnnnnnnnnnnnnnnnnnnnnnnnnnnnnnnnnnnnnnnnnnnnnnnnnnnnnnnnnnnnnnnnnnnnnnnnnnnnnnnnnnnnnnnnnnnnnnnnnnnnnnnnnnnnnnnnnnnnnnnnnnnnnnnnnnnnnnnnnnnnnnnnnnnnnnnnnnnnnnnnnnnnnnnnnnnnnnnnnnnnnnnnnnnnnnnnnnnnnnnnnnnnnnnnnnnnnnnnnnnnnnnnnnnnnnnnnnnnnnnnnnnnnnnnnnnnnnnnnnnnnnnnnnnnnnnnnnnnnnnnnnnnnnnnnnnnnnnnnnnnnnnnnnnnnnnnnnnnnnnnnnnnnnnnnnnnnnnnnnnnnnnnnnnnnnnnnnnnnnnnnnnnnnnnnnnnnnnnnnnnnnnnnnnnnnnnnnnnnnnnnnnnnnnnnnnnnnnnnnnnnnnnnnnnnnnnnnnnnnnnnnnnnnnnnnnnnnnnnnnnnnnnnnnnnnnnnnnnnnnnnnnnnnnnnnnnnnnnnnnnnnnnnnnnnnnnnnnnnnnnnnnnnnnnnnnnnnnnnnnnnnnnnnnnnnnnnnnnnnnnnnnnnnnnnnnnnnnnnnnnnnnnnnnnnnnnnnnnnnnnnnnnnnnnnnnnnnnnnnnnnnnnnnnnnnnnnnnnnnnnnnnnnnnnnnnnnnnnnnnnnnnnnnnnnnnnnnnnnnnnnnnnnnnnnnnnnnnnnnnnnnnnnnnnnnnnnnnnnnnnnnnnnnnnnnnnnnnnnnnnnnnnnnnnnnnnnnnnnnnnnnnnnnnnnnnnnnnnnnnnnnnnnnnnnnnnnnnnnnnnnnnnnnnnnnnnnnnnnnnnnnnnnnnnnnnnnnnnnnnnnnnnnnnnnnnnnnnnnnnnnnnnnnnnnnnnnnnnnnnnnnnnnnnnnnnnnnnnnnnnnnnnnnnnnnnnnnnnnnnnnnnnnnnnnnnnnnnnnnnnnnnnnnnnnnnnnnnnnnnnnnnnnnnnnnnnnnnnnnnnnnnnnnnnnnnnnnnnnnnnnnnnnnnnnnnnnnnnnnnnnnnnnnnnnnnnnnnnnnnnnnnnnnnnnnnnnnnnnnnnnnnnnnnnnnnnnnnnnnnnnnnnnnnnnnnnnnnnnnnnnnnnnnnnnnnnnnnnnnnnnnnnnnnnnnnnnnnnnnnnnnnnnnnnnnnnnnnnnnnnnnnnnnnnnnnnnnnnnnnnnnnnnnnnnnnnnnnnnnnnnnnnnnnnnnnnnnnnnnnnnnnnnnnnnnnnnnnnnnnnnnnnnnnnnnnnnnnnnnnnnnnnnnnnnnnnnnnnnnnnnnnnnnnnnnnnnnnnnnnnnnnnnnnnnnnnnnnnnnnnnnnnnnnnnnnnnnnnnnnnnnnnnnnnnnnnnnnnnnnnnnnnnnnnnnnnnnnnnnnnnnnnnnnnnnnnnnnnnnnnnnnnnnnnnnnnnnnnnnnnnnnnnnnnnnnnnnnnnnnnnnnnnnnnnnnnnnnnnnnnnnnnnnnnnnnnnnnnnnnnnnnnnnnnnnnnnnnnnnnnnnnnnnnnnnnnnnnnnnnnnnnnnnnnnnnnnnnnnnnnnnnnnnnnnnnnnnnnnnnnnnnnnnnnnnnnnnnnnnnnnnnnnnnnnnnnnnnnnnnnnnnnnnnnnnnnnnnnnnnnnnnnnnnnnnnnnnnnnnnnnnnnnnnnnnnnnnnnnnnnnnnnnnnnnnnnnnnnnnnnnnnnnnnnnnnnnnnnnnnnnnnnnnnnnnnnnnnnnnnnnnnnnnnnnnnnnnnnnnnnnnnnnnnnnnnnnnnnnnnnnnnnnnnnnnnnnnnnnnnnnnnnnnnnnnnnnnnnnnnnnnnnnnnnnnnnnnnnnnnnnnnnnnnnnnnnnnnnnnnnnnnnnnnnnnnnnnnnnnnnnnnnnnnnnnnnnnnnnnnnnnnnnnnnnnnnnnnnnnnnnnnnnnnnnnnnnnnnnnnnnnnnnnnnnnnnnnnnnnnnnnnnnnnnnnnnnnnnnnnnnnnnnnnnnnnnnnnnnnnnnnnnnnnnnnnnnnnnnnnnnnnnnnnnnnnnnnnnnnnnnnnnnnnnnnnnnnnnnnnnnnnnnnnnnnnnnnnnnnnnnnnnnnnnnnnnnnnnnnnnnnnnnnnnnnnnnnnnnnnnnnnnnnnnnnnnnnnnnnnnnnnnnnnnnnnnnnnnnnnnnnnnnnnnnnnnnnnnnnnnnnnnnnnnnnnnnnnnnnnnnnnnnnnnnnnnnnnnnnnnnnnnnnnnnnnnnnnnnnnnnnnnnnnnnnnnnnnnnnnnnnnnnnnnnnnnnnnnnnnnnnnnnnnnnnnnnnnnnnnnnnnnnnnnnnnnnnnnnnnnnnnnnnnnnnnnnnnnnnnnnnnnnnnnnnnnnnnnnnnnnnnnnnnnnnnnnnnnnnnnnnnnnnnnnnnnnnnnnnnnnnnnnnnnnnnnnnnnnnnnnnnnnnnnnnnnnnnnnnnnnnnnnnnnnnnnnnnnnnnnnnnnnnnnnnnnnnnnnnnnnnnnnnnnnnnnnnnnnnnnnnnnnnnnnnnnnnnnnnnnnnnnnnnnnnnnnnnnnnnnnnnnnnnnnnnnnnnnnnnnnnnnnnnnnnnnnnnnnnnnnnnnnnnnnnnnnnnnnnnnnnnnnnnnnnnnnnnnnnnnnnnnnnnnnnnnnnnnnnnnnnnnnnnnnnnnnnnnnnnnnnnnnnnnnnnnnnnnnnnnnnnnnnnnnnnnnnnnnnnnnnnnnnnnnnnnnnnnnnnnnnnnnnnnnnnnnnnnnnnnnnnnnnnnnnnnnnnnnnnnnnnnnnnnnnnnnnnnnnnnnnnnnnnnnnnnnnnnnnnnnnnnnnnnnnnnnnnnnnnnnnnnnnnnnnnnnnnnnnnnnnnnnnnnnnnnnnnnnnnnnnnnnnnnnnnnnnnnnnnnnnnnnnnnnnnnnnnnnnnnnnnnnnnnnnnnnnnnnnnnnnnnnnnnnnnnnnnnnnnnnnnnnnnnnnnnnnnnnnnnnnnnnnnnnnnnnnnnnnnnnnnnnnnnnnnnnnnnnnnnnnnnnnnnnnnnnnnnnnnnnnnnnnnnnnnnnnnnnnnnnnnnnnnnnnnnnnnnnnnnnnnnnnnnnnnnnnnnnnnnnnnnnnnnnnnnnnnnnnnnnnnnnnnnnnnnnnnnnnnnnnnnnnnnnnnnnnnnnnnnnnnnnnnnnnnnnnnnnnnnnnnnnnnnnnnnnnnnnnnnnnnnnnnnnnnnnnnnnnnnnnnnnnnnnnnnnnnnnnnnnnnnnnnnnnnnnnnnnnnnnnnnnnnnnnnnnnnnnnnnnnnnnnnnnnnnnnnnnnnnnnnnnnnnnnnnnnnnnnnnnnnnnnnnnnnnnnnnnnnnnnnnnnnnnnnnnnnnnnnnnnnnnnnnnnnnnnnnnnnnnnnnnnnnnnnnnnnnnnnnnnnnnnnnnnnnnnnnnnnnnnnnnnnnnnnnnnnnnnnnnnnnnnnnnnnnnnnnnnnnnnnnnnnnnnnnnnnnnnnnnnnnnnnnnnnnnnnnnnnnnnnnnnnnnnnnnnnnnnnnnnnnnnnnnnnnnnnnnnnnnnnnnnnnnnnnnnnnnnnnnnnnnnnnnnnnnnnnnnnnnnnnnnnnnnnnnnnnnnnnnnnnnnnnnnnnnnnnnnnnnnnnnnnnnnnnnnnnnnnnnnnnnnnnnnnnnnnnnnnnnnnnnnnnnnnnnnnnnnnnnnnnnnnnnnnnnnnnnnnnnnnnnnnnnnnnnnnnnnnnnnnnnnnnnnnnnnnnnnnnnnnnnnnnnnnnnnnnnnnnnnnnnnnnnnnnnnnnnnnnnnnnnnnnnnnnnnnnnnnnnnnnnnnnnnnnnnnnnnnnnnnnnnnnnnnnnnnnnnnnnnnnnnnnnnnnnnnnnnnnnnnnnnnnnnnnnnnnnnnnnnnnnnnnnnnnnnnnnnnnnnnnnnnnnnnnnnnnnnnnnnnnnnnnnnnnnnnnnnnnnnnnnnnnnnnnnnnnnnnnnnnnnnnnnnnnnnnnnnnnnnnnnnnnnnnnnnnnnnnnnnnnnnnnnnnnnnnnnnnnnnnnnnnnnnnnnnnnnnnnnnnnnnnnnnnnnnnnnnnnnnnnnnnnnnnnnnnnnnnnnnnnnnnnnnnnnnnnnnnnnnnnnnnnnnnnnnnnnnnnnnnnnnnnnnnnnnnnnnnnnnnnnnnnnnnnnnnnnnnnnnnnnnnnnnnnnnnnnnnnnnnnnnnnnnnnnnnnnnnnnnnnnnnnnnnnnnnnnnnnnnnnnnnnnnnnnnnnnnnnnnnnnnnnnnnnnnnnnnnnnnnnnnnnnnnnnnnnnnnnnnnnnnnnnnnnnnnnnnnnnnnnnnnnnnnnnnnnnnnnnnnnnnnnnnnnnnnnnnnnnnnnnnnnnnnnnnnnnnnnnnnnnnnnnnnnnnnnnnnnnnnnnnnnnnnnnnnnnnnnnnnnnnnnnnnnnnnnnnnnnnnnnnnnnnnnnnnnnnnnnnnnnnnnnnnnnnnnnnnnnnnnnnnnnnnnnnnnnnnnnnnnnnnnnnnnnnnnnnnnnnnnnnnnnnnnnnnnnnnnnnnnnnnnnnnnnnnnnnnnnnnnnnnnnnnnnnnnnnnnnnnnnnnnnnnnnnnnnnnnnnnnnnnnnnnnnnnnnnnnnnnnnnnnnnnnnnnnnnnnnnnnnnnnnnnnnnnnnnnnnnnnnnnnnnnnnnnnnnnnnnnnnnnnnnnnnnnnnnnnnnnnnnnnnnnnnnnnnnnnnnnnnnnnnnnnnnnnnnnnnnnnnnnnnnnnnnnnnnnnnnnnnnnnnnnnnnnnnnnnnnnnnnnnnnnnnnnnnnnnnnnnnnnnnnnnnnnnnnnnnnnnnnnnnnnnnnnnnnnnnnnnnnnnnnnnnnnnnnnnnnnnnnnnnnnnnnnnnnnnnnnnnnnnnnnnnnnnnnnnnnnnnnnnnnnnnnnnnnnnnnnnnnnnnnnnnnnnnnnnnnnnnnnnnnnnnnnnnnnnnnnnnnnnnnnnnnnnnnnnnnnnnnnnnnnnnnnnnnnnnnnnnnnnnnnnnnnnnnnnnnnnnnnnnnnnnnnnnnnnnnnnnnnnnnnnnnnnnnnnnnnnnnnnnnnnnnnnnnnnnnnnnnnnnnnnnnnnnnnnnnnnnnnnnnnnnnnnnnnnnnnnnnnnnnnnnnnnnnnnnnnnnnnnnnnnnnnnnnnnnnnnnnnnnnnnnnnnnnnnnnnnnnnnnnnnnnnnnnnnnnnnnnnnnnnnnnnnnnnnnnnnnnnnnnnnnnnnnnnnnnnnnnnnnnnnnnnnnnnnnnnnnnnnnnnnnnnnnnnnnnnnnnnnnnnnnnnnnnnnnnnnnnnnnnnnnnnnnnnnnnnnnnnnnnnnnnnnnnnnnnnnnnnnnnnnnnnnnnnnnnnnnnnnnnnnnnnnnnnnnnnnnnnnnnnnnnnnnnnnnnnnnnnnnnnnnnnnnnnnnnnnnnnnnnnnnnnnnnnnnnnnnnnnnnnnnnnnnnnnnnnnnnnnnnnnnnnnnnnnnnnnnnnnnnnnnnnnnnnnnnnnnnnnnnnnnnnnnnnnnnnnnnnnnnnnnnnnnnnnnnnnnnnnnnnnnnnnnnnnnnnnnnnnnnnnnnnnnnnnnnnnnnnnnnnnnnnnnnnnnnnnnnnnnnnnnnnnnnnnnnnnnnnnnnnnnnnnnnnnnnnnnnnnnnnnnnnnnnnnnnnnnnnnnnnnnnnnnnnnnnnnnnnnnnnnnnnnnnnnnnnnnnnnnnnnnnnnnnnnnnnnnnnnnnnnnnnnnnnnnnnnnnnnnnnnnnnnnnnnnnnnnnnnnnnnnnnnnnnnnnnnnnnnnnnnnnnnnnnnnnnnnnnnnnnnnnnnnnnnnnnnnnnnnnnnnnnnnnnnnnnnnnnnnnnnnnnnnnnnnnnnnnnnnnnnnnnnnnnnnnnnnnnnnnnnnnnnnnnnnnnnnnnnnnnnnnnnnnnnnnnnnnnnnnnnnnnnnnnnnnnnnnnnnnnnnnnnnnnnnnnnnnnnnnnnnnnnnnnnnnnnnnnnnnnnnnnnnnnnnnnnnnnnnnnnnnnnnnnnnnnnnnnnnnnnnnnnnnnnnnnnnnnnnnnnnnnnnnnnnnnnnnnnnnnnnnnnnnnnnnnnnnnnnnnnnnnnnnnnnnnnnnnnnnnnnnnnnnnnnnnnnnnnnnnnnnnnnnnnnnnnnnnnnnnnnnnnnnnnnnnnnnnnnnnnnnnnnnnnnnnnnnnnnnnnnnnnnnnnnnnnnnnnnnnnnnnnnnnnnnnnnnnnnnnnnnnnnnnnnnnnnnnnnnnnnnnnnnnnnnnnnnnnnnnnnnnnnnnnnnnnnnnnnnnnnnnnnnnnnnnnnnnnnnnnnnnnnnnnnnnnnnnnnnnnnnnnnnnnnnnnnnnnnnnnnnnnnnnnnnnnnnnnnnnnnnnnnnnnnnnnnnnnnnnnnnnnnnnnnnnnnnnnnnnnnnnnnnnnnnnnnnnnnnnnnnnnnnnnnnnnnnnnnnnnnnnnnnnnnnnnnnnnnnnnnnnnnnnnnnnnnnnnnnnnnnnnnnnnnnnnnnnnnnnnnnnnnnnnnnnnnnnnnnnnnnnnnnnnnnnnnnnnnnnnnnnnnnnnnnnnnnnnnnnnnnnnnnnnnnnnnnnnnnnnnnnnnnnnnnnnnnnnnnnnnnnnnnnnnnnnnnnnnnnnnnnnnnnnnnnnnnnnnnnnnnnnnnnnnnnnnnnnnnnnnnnnnnnnnnnnnnnnnnnnnnnnnnnnnnnnnnnnnnnnnnnnnnnnnnnnnnnnnnnnnnnnnnnnnnnnnnnnnnnnnnnnnnnnnnnnnnnnnnnnnnnnnnnnnnnnnnnnnnnnnnnnnnnnnnnnnnnnnnnnnnnnnnnnnnnnnnnnnnnnnnnnnnnnnnnnnnnnnnnnnnnnnnnnnnnnnnnnnnnnnnnnnnnnnnnnnnnnnnnnnnnnnnnnnnnnnnnnnnnnnnnnnnnnnnnnnnnnnnnnnnnnnnnnnnnnnnnnnnnnnnnnnnnnnnnnnnnnnnnnnnnnnnnnnnnnnnnnnnnnnnnnnnnnnnnnnnnnnnnnnnnnnnnnnnnnnnnnnnnnnnnnnnnnnnnnnnnnnnnnnnnnnnnnnnnnnnnnnnnnnnnnnnnnnnnnnnnnnnnnnnnnnnnnnnnnnnnnnnnnnnnnnnnnnnnnnnnnnnnnnnnnnnnnnnnnnnnnnnnnnnnnnnnnnnnnnnnnnnnnnnnnnnnnnnnnnnnnnnnnnnnnnnnnnnnnnnnnnnnnnnnnnnnnnnnnnnnnnnnnnnnnnnnnnnnnnnnnnnnnnnnnnnnnnnnnnnnnnnnnnnnnnnnnnnnnnnnnnnnnnnnnnnnnnnnnnnnnnnnnnnnnnnnnnnnnnnnnnnnnnnnnnnnnnnnnnnnnnnnnnnnnnnnnnnnnnnnnnnnnnnnnnnnnnnnnnnnnnnnnnnnnnnnnnnnnnnnnnnnnnnnnnnnnnnnnnnnnnnnnnnnnnnnnnnnnnnnnnnnnnnnnnnnnnnnnnnnnnnnnnnnnnnnnnnnnnnnnnnnnnnnnnnnnnnnnnnnnnnnnnnnnnnnnnnnnnnnnnnnnnnnnnnnnnnnnnnnnnnnnnnnnnnnnnnnnnnnnnnnnnnnnnnnnnnnnnnnnnnnnnnnnnnnnnnnnnnnnnnnnnnnnnnnnnnnnnnnnnnnnnnnnnnnnnnnnnnnnnnnnnnnnnnnnnnnnnnnnnnnnnnnnnnnnnnnnnnnnnnnnnnnnnnnnnnnnnnnnnnnnnnnnnnnnnnnnnnnnnnnnnnnnnnnnnnnnnnnnnnnnnnnnnnnnnnnnnnnnnnnnnnnnnnnnnnnnnnnnnnnnnnnnnnnnnnnnnnnnnnnnnnnnnnnnnnnnnnnnnnnnnnnnnnnnnnnnnnnnnnnnnnnnnnnnnnnnnnnnnnnnnnnnnnnnnnnnnnnnnnnnnnnnnnnnnnnnnnnnnnnnnnnnnnnnnnnnnnnnnnnnnnnnnnnnnnnnnnnnnnnnnnnnnnnnnnnnnnnnnnnnnnnnnnnnnnnnnnnnnnnnnnnnnnnnnnnnnnnnnnnnnnnnnnnnnnnnnnnnnnnnnnnnnnnnnnnnnnnnnnnnnnnnnnnnnnnnnnnnnnnnnnnnnnnnnnnnnnnnnnnnnnnnnnnnnnnnnnnnnnnnnnnnnnnnnnnnnnnnnnnnnnnnnnnnnnnnnnnnnnnnnnnnnnnnnnnnnnnnnnnnnnnnnnnnnnnnnnnnnnnnnnnnnnnnnnnnnnnnnnnnnnnnnnnnnnnnnnnnnnnnnnnnnnnnnnnnnnnnnnnnnnnnnnnnnnnnnnnnnnnnnnnnnnnnnnnnnnnnnnnnnnnnnnnnnnnnnnnnnnnnnnnnnnnnnnnnnnnnnnnnnnnnnnnnnnnnnnnnnnnnnnnnnnnnnnnnnnnnnnnnnnnnnnnnnnnnnnnnnnnnnnnnnnnnnnnnnnnnnnnnnnnnnnnnnnnnnnnnnnnnnnnnnnnnnnnnnnnnnnnnnnnnnnnnnnnnnnnnnnnnnnnnnnnnnnnnnnnnnnnnnnnnnnnnnnnnnnnnnnnnnnnnnnnnnnnnnnnnnnnnnnnnnnnnnnnnnnnnnnnnnnnnnnnnnnnnnnnnnnnnnnnnnnnnnnnnnnnnnnnnnnnnnnnnnnnnnnnnnnnnnnnnnnnnnnnnnnnnnnnnnnnnnnnnnnnnnnnnnnnnnnnnnnnnnnnnnnnnnnnnnnnnnnnnnnnnnnnnnnnnnnnnnnnnnnnnnnnnnnnnnnnnnnnnnnnnnnnnnnnnnnnnnnnnnnnnnnnnnnnnnnnnnnnnnnnnnnnnnnnnnnnnnnnnnnnnnnnnnnnnnnnnnnnnnnnnnnnnnnnnnnnnnnnnnnnnnnnnnnnnnnnnnnnnnnnnnnnnnnnnnnnnnnnnnnnnnnnnnnnnnnnnnnnnnnnnnnnnnnnnnnnnnnnnnnnnnnnnnnnnnnnnnnnnnnnnnnnnnnnnnnnnnnnnnnnnnnnnnnnnnnnnnnnnnnnnnnnnnnnnnnnnnnnnnnnnnnnnnnnnnnnnnnnnnnnnnnnnnnnnnnnnnnnnnnnnnnnnnnnnnnnnnnnnnnnnnnnnnnnnnnnnnnnnnnnnnnnnnnnnnnnnnnnnnnnnnnnnnnnnnnnnnnnnnnnnnnnnnnnnnnnnnnnnnnnnnnnnnnnnnnnnnnnnnnnnnnnnnnnnnnnnnnnnnnnnnnnnnnnnnnnnnnnnnnnnnnnnnnnnnnnnnnnnnnnnnnnnnnnnnnnnnnnnnnnnnnnnnnnnnnnnnnnnnnnnnnnnnnnnnnnnnnnnnnnnnnnnnnnnnnnnnnnnnnnnnnnnnnnnnnnnnnnnnnnnnnnnnnnnnnnnnnnnnnnnnnnnnnnnnnnnnnnnnnnnnnnnnnnnnnnnnnnnnnnnnnnnnnnnnnnnnnnnnnnnnnnnnnnnnnnnnnnnnnnnnnnnnnnnnnnnnnnnnnnnnnnnnnnnnnnnnnnnnnnnnnnnnnnnnnnnnnnnnnnnnnnnnnnnnnnnnnnnnnnnnnnnnnnnnnnnnnnnnnnnnnnnnnnnnnnnnnnnnnnnnnnnnnnnnnnnnnnnnnnnnnnnnnnnnnnnnnnnnnnnnnnnnnnnnnnnnnnnnnnnnnnnnnnnnnnnnnnnnnnnnnnnnnnnnnnnnnnnnnnnnnnnnnnnnnnnnnnnnnnnnnnnnnnnnnnnnnnnnnnnnnnnnnnnnnnnnnnnnnnnnnnnnnnnnnnnnnnnnnnnnnnnnnnnnnnnnnnnnnnnnnnnnnnnnnnnnnnnnnnnnnnnnnnnnnnnnnnnnnnnnnnnnnnnnnnnnnnnnnnnnnnnnnnnnnnnnnnnnnnnnnnnnnnnnnnnnnnnnnnnnnnnnnnnnnnnnnnnnnnnnnnnnnnnnnnnnnnnnnnnnnnnnnnnnnnnnnnnnnnnnnnnnnnnnnnnnnnnnnnnnnnnnnnnnnnnnnnnnnnnnnnnnnnnnnnnnnnnnnnnnnnnnnnnnnnnnnnnnnnnnnnnnnnnnnnnnnnnnnnnnnnnnnnnnnnnnnnnnnnnnnnnnnnnnnnnnnnnnnnnnnnnnnnnnnnnnnnnnnnnnnnnnnnnnnnnnnnnnnnnnnnnnnnnnnnnnnnnnnnnnnnnnnnnnnnnnnnnnnnnnnnnnnnnnnnnnnnnnnnnnnnnnnnnnnnnnnnnnnnnnnnnnnnnnnnnnnnnnnnnnnnnnnnnnnnnnnnnnnnnnnnnnnnnnnnnnnnnnnnnnnnnnnnnnnnnnnnnnnnnnnnnnnnnnnnnnnnnnnnnnnnnnnnnnnnnnnnnnnnnnnnnnnnnnnnnnnnnnnnnnnnnnnnnnnnnnnnnnnnnnnnnnnnnnnnnnnnnnnnnnnnnnnnnnnnnnnnnnnnnnnnnnnnnnnnnnnnnnnnnnnnnnnnnnnnnnnnnnnnnnnnnnnnnnnnnnnnnnnnnnnnnnnnnnnnnnnnnnnnnnnnnnnnnnnnnnnnnnnnnnnnnnnnnnnnnnnnnnnnnnnnnnnnnnnnnnnnnnnnnnnnnnnnnnnnnnnnnnnnnnnnnnnnnnnnnnnnnnnnnnnnnnnnnnnnnnnnnnnnnnnnnnnnnnnnnnnnnnnnnnnnnnnnnnnnnnnnnnnnnnnnnnnnnnnnnnnnnnnnnnnnnnnnnnnnnnnnnnnnnnnnnnnnnnnnnnnnnnnnnnnnnnnnnnnnnnnnnnnnnnnnnnnnnnnnnnnnnnnnnnnnnnnnnnnnnnnnnnnnnnnnnnnnnnnnnnnnnnnnnnnnnnnnnnnnnnnnnnnnnnnnnnnnnnnnnnnnnnnnnnnnnnnnnnnnnnnnnnnnnnnnnnnnnnnnnnnnnnnnnnnnnnnnnnnnnnnnnnnnnnnnnnnnnnnnnnnnnnnnnnnnnnnnnnnnnnnnnnnnnnnnnnnnnnnnnnnnnnnnnnnnnnnnnnnnnnnnnnnnnnnnnnnnnnnnnnnnnnnnnnnnnnnnnnnnnnnnnnnnnnnnnnnnnnnnnnnnnnnnnnnnnnnnnnnnnnnnnnnnnnnnnnnnnnnnnnnnnnnnnnnnnnnnnnnnnnnnnnnnnnnnnnnnnnnnnnnnnnnnnnnnnnnnnnnnnnnnnnnnnnnnnnnnnnnnnnnnnnnnnnnnnnnnnnnnnnnnnnnnnnnnnnnnnnnnnnnnnnnnnnnnnnnnnnnnnnnnnnnnnnnnnnnnnnnnnnnnnnnnnnnnnnnnnnnnnnnnnnnnnnnnnnnnnnnnnnnnnnnnnnnnnnnnnnnnnnnnnnnnnnnnnnnnnnnnnnnnnnnnnnnnnnnnnnnnnnnnnnnnnnnnnnnnnnnnnnnnnnnnnnnnnnnnnnnnnnnnnnnnnnnnnnnnnnnnnnnnnnnnnnnnnnnnnnnnnnnnnnnnnnnnnnnnnnnnnnnnnnnnnnnnnnnnnnnnnnnnnnnnnnnnnnnnnnnnnnnnnnnnnnnnnnnnnnnnnnnnnnnnnnnnnnnnnnnnnnnnnnnnnnnnnnnnnnnnnnnnnnnnnnnnnnnnnnnnnnnnnnnnnnnnnnnnnnnnnnnnnnnnnnnnnnnnnnnnnnnnnnnnnnnnnnnnnnnnnnnnnnnnnnnnnnnnnnnnnnnnnnnnnnnnnnnnnnnnnnnnnnnnnnnnnnnnnnnnnnnnnnnnnnnnnnnnnnnnnnnnnnnnnnnnnnnnnnnnnnnnnnnnnnnnnnnnnnnnnnnnnnnnnnnnnnnnnnnnnnnnnnnnnnnnnnnnnnnnnnnnnnnnnnnnnnnnnnnnnnnnnnnnnnnnnnnnnnnnnnnnnnnnnnnnnnnnnnnnnnnnnnnnnnnnnnnnnnnnnnnnnnnnnnnnnnnnnnnnnnnnnnnnnnnnnnnnnnnnnnnnnnnnnnnnnnnnnnnnnnnnnnnnnnnnnnnnnnnnnnnnnnnnnnnnnnnnnnnnnnnnnnnnnnnnnnnnnnnnnnnnnnnnnnnnnnnnnnnnnnnnnnnnnnnnnnnnnnnnnnnnnnnnnnnnnnnnnnnnnnnnnnnnnnnnnnnnnnnnnnnnnnnnnnnnnnnnnnnnnnnnnnnnnnnnnnnnnnnnnnnnnnnnnnnnnnnnnnnnnnnnnnnnnnnnnnnnnnnnnnnnnnnnnnnnnnnnnnnnnnnnnnnnnnnnnnnnnnnnnnnnnnnnnnnnnnnnnnnnnnnnnnnnnnnnnnnnnnnnnnnnnnnnnnnnnnnnnnnnnnnnnnnnnnnnnnnnnnnnnnnnnnnnnnnnnnnnnnnnnnnnnnnnnnnnnnnnnnnnnnnnnnnnnnnnnnnnnnnnnnnnnnnnnnnnnnnnnnnnnnnnnnnnnnnnnnnnnnnnnnnnnnnnnnnnnnnnnnnnnnnnnnnnnnnnnnnnnnnnnnnnnnnnnnnnnnnnnnnnnnnnnnnnnnnnnnnnnnnnnnnnnnnnnnnnnnnnnnnnnnnnnnnnnnnnnnnnnnnnnnnnnnnnnnnnnnnnnnnnnnnnnnnnnnnnnnnnnnnnnnnnnnnnnnnnnnnnnnnnnnnnnnnnnnnnnnnnnnnnnnnnnnnnnnnnnnnnnnnnnnnnnnnnnnnnnnnnnnnnnnnnnnnnnnnnnnnnnnnnnnnnnnnnnnnnnnnnnnnnnnnnnnnnnnnnnnnnnnnnnnnnnnnnnnnnnnnnnnnnnnnnnnnnnnnnnnnnnnnnnnnnnnnnnnnnnnnnnnnnnnnnnnnnnnnnnnnnnnnnnnnnnnnnnnnnnnnnnnnnnnnnnnnnnnnnnnnnnnnnnnnnnnnnnnnnnnnnnnnnnnnnnnnnnnnnnnnnnnnnnnnnnnnnnnnnnnnnnnnnnnnnnnnnnnnnnnnnnnnnnnnnnnnnnnnnnnnnnnnnnnnnnnnnnnnnnnnnnnnnnnnnnnnnnnnnnnnnnnnnnnnnnnnnnnnnnnnnnnnnnnnnnnnnnnnnnnnnnnnnnnnnnnnnnnnnnnnnnnnnnnnnnnnnnnnnnnnnnnnnnnnnnnnnnnnnnnnnnnnnnnnnnnnnnnnnnnnnnnnnnnnnnnnnnnnnnnnnnnnnnnnnnnnnnnnnnnnnnnnnnnnnnnnnnnnnnnnnnnnnnnnnnnnnnnnnnnnnnnnnnnnnnnnnnnnnnnnnnnnnnnnnnnnnnnnnnnnnnnnnnnnnnnnnnnnnnnnnnnnnnnnnnnnnnnnnnnnnnnnnnnnnnnnnnnnnnnnnnnnnnnnnnnnnnnnnnnnnnnnnnnnnnnnnnnnnnnnnnnnnnnnnnnnnnnnnnnnnnnnnnnnnnnnnnnnnnnnnnnnnnnnnnnnnnnnnnnnnnnnnnnnnnnnnnnnnnnnnnnnnnnnnnnnnnnnnnnnnnnnnnnnnnnnnnnnnnnnnnnnnnnnnnnnnnnnnnnnnnnnnnnnnnnnnnnnnnnnnnnnnnnnnnnnnnnnnnnnnnnnnnnnnnnnnnnnnnnnnnnnnnnnnnnnnnnnnnnnnnnnnnnnnnnnnnnnnnnnnnnnnnnnnnnnnnnnnnnnnnnnnnnnnnnnnnnnnnnnnnnnnnnnnnnnnnnnnnnnnnnnnnnnnnnnnnnnnnnnnnnnnnnnnnnnnnnnnnnnnnnnnnnnnnnnnnnnnnnnnnnnnnnnnnnnnnnnnnnnnnnnnnnnnnnnnnnnnnnnnnnnnnnnnnnnnnnnnnnnnnnnnnnnnnnnnnnnnnnnnnnnnnnnnnnnnnnnnnnnnnnnnnnnnnnnnnnnnnnnnnnnnnnnnnnnnnnnnnnnnnnnnnnnnnnnnnnnnnnnnnnnnnnnnnnnnnnnnnnnnnnnnnnnnnnnnnnnnnnnnnnnnnnnnnnnnnnnnnnnnnnnnnnnnnnnnnnnnnnnnnnnnnnnnnnnnnnnnnnnnnnnnnnnnnnnnnnnnnnnnnnnnnnnnnnnnnnnnnnnnnnnnnnnnnnnnnnnnnnnnnnnnnnnnnnnnnnnnnnnnnnnnnnnnnnnnnnnnnnnnnnnnnnnnnnnnnnnnnnnnnnnnnnnnnnnnnnnnnnnnnnnnnnnnnnnnnnnnnnnnnnnnnnnnnnnnnnnnnnnnnnnnnnnnnnnnnnnnnnnnnnnnnnnnnnnnnnnnnnnnnnnnnnnnnnnnnnnnnnnnnnnnnnnnnnnnnnnnnnnnnnnnnnnnnnnnnnnnnnnnnnnnnnnnnnnnnnnnnnnnnnnnnnnnnnnnnnnnnnnnnnnnnnnnnnnnnnnnnnnnnnnnnnnnnnnnnnnnnnnnnnnnnnnnnnnnnnnnnnnnnnnnnnnnnnnnnnnnnnnnnnnnnnnnnnnnnnnnnnnnnnnnnnnnnnnnnnnnnnnnnnnnnnnnnnnnnnnnnnnnnnnnnnnnnnnnnnnnnnnnnnnnnnnnnnnnnnnnnnnnnnnnnnnnnnnnnnnnnnnnnnnnnnnnnnnnnnnnnnnnnnnnnnnnnnnnnnnnnnnnnnnnnnnnnnnnnnnnnnnnnnnnnnnnnnnnnnnnnnnnnnnnnnnnnnnnnnnnnnnnnnnnnnnnnnnnnnnnnnnnnnnnnnnnnnnnnnnnnnnnnnnnnnnnnnnnnnnnnnnnnnnnnnnnnnnnnnnnnnnnnnnnnnnnnnnnnnnnnnnnnnnnnnnnnnnnnnnnnnnnnnnnnnnnnnnnnnnnnnnnnnnnnnnnnnnnnnnnnnnnnnnnnnnnnnnnnnnnnnnnnnnnnnnnnnnnnnnnnnnnnnnnnnnnnnnnnnnnnnnnnnnnnnnnnnnnnnnnnnnnnnnnnnnnnnnnnnnnnnnnnnnnnnnnnnnnnnnnnnnnnnnnnnnnnnnnnnnnnnnnnnnnnnnnnnnnnnnnnnnnnnnnnnnnnnnnnnnnnnnnnnnnnnnnnnnnnnnnnnnnnnnnnnnnnnnnnnnnnnnnnnnnnnnnnnnnnnnnnnnnnnnnnnnnnnnnnnnnnnnnnnnnnnnnnnnnnnnnnnnnnnnnnnnnnnnnnnnnnnnnnnnnnnnnnnnnnnnnnnnnnnnnnnnnnnnnnnnnnnnnnnnnnnnnnnnnnnnnnnnnnnnnnnnnnnnnnnnnnnnnnnnnnnnnnnnnnnnnnnnnnnnnnnnnnnnnnnnnnnnnnnnnnnnnnnnnnnnnnnnnnnnnnnnnnnnnnnnnnnnnnnnnnnnnnnnnnnnnnnnnnnnnnnnnnnnnnnnnnnnnnnnnnnnnnnnnnnnnnnnnnnnnnnnnnnnnnnnnnnnnnnnnnnnnnnnnnnnnnnnnnnnnnnnnnnnnnnnnnnnnnnnnnnnnnnnnnnnnnnnnnnnnnnnnnnnnnnnnnnnnnnnnnnnnnnnnnnnnnnnnnnnnnnnnnnnnnnnnnnnnnnnnnnnnnnnnnnnnnnnnnnnnnnnnnnnnnnnnnnnnnnnnnnnnnnnnnnnnnnnnnnnnnnnnnnnnnnnnnnnnnnnnnnnnnnnnnnnnnnnnnnnnnnnnnnnnnnnnnnnnnnnnnnnnnnnnnnnnnnnnnnnnnnnnnnnnnnnnnnnnnnnnnnnnnnnnnnnnnnnnnnnnnnnnnnnnnnnnnnnnnnnnnnnnnnnnnnnnnnnnnnnnnnnnnnnnnnnnnnnnnnnnnnnnnnnnnnnnnnnnnnnnnnnnnnnnnnnnnnnnnnnnnnnnnnnnnnnnnnnnnnnnnnnnnnnnnnnnnnnnnnnnnnnnnnnnnnnnnnnnnnnnnnnnnnnnnnnnnnnnnnnnnnnnnnnnnnnnnnnnnnnnnnnnnnnnnnnnnnnnnnnnnnnnnnnnnnnnnnnnnnnnnnnnnnnnnnnnnnnnnnnnnnnnnnnnnnnnnnnnnnnnnnnnnnnnnnnnnnnnnnnnnnnnnnnnnnnnnnnnnnnnnnnnnnnnnnnnnnnnnnnnnnnnnnnnnnnnnnnnnnnnnnnnnnnnnnnnnnnnnnnnnnnnnnnnnnnnnnnnnnnnnnnnnnnnnnnnnnnnnnnnnnnnnnnnnnnnnnnnnnnnnnnnnnnnnnnnnnnnnnnnnnnnnnnnnnnnnnnnnnnnnnnnnnnnnnnnnnnnnnnnnnnnnnnnnnnnnnnnnnnnnnnnnnnnnnnnnnnnnnnnnnnnnnnnnnnnnnnnnnnnnnnnnnnnnnnnnnnnnnnnnnnnnnnnnnnnnnnnnnnnnnnnnnnnnnnnnnnnnnnnnnnnnnnnnnnnnnnnnnnnnnnnnnnnnnnnnnnnnnnnnnnnnnnnnnnnnnnnnnnnnnnnnnnnnnnnnnnnnnnnnnnnnnnnnnnnnnnnnnnnnnnnnnnnnnnnnnnnnnnnnnnnnnnnnnnnnnnnnnnnnnnnnnnnnnnnnnnnnnnnnnnnnnnnnnnnnnnnnnnnnnnnnnnnnnnnnnnnnnnnnnnnnnnnnnnnnnnnnnnnnnnnnnnnnnnnnnnnnnnnnnnnnnnnnnnnnnnnnnnnnnnnnnnnnnnnnnnnnnnnnnnnnnnnnnnnnnnnnnnnnnnnnnnnnnnnnnnnnnnnnnnnnnnnnnnnnnnnnnnnnnnnnnnnnnnnnnnnnnnnnnnnnnnnnnnnnnnnnnnnnnnnnnnnnnnnnnnnnnnnnnnnnnnnnnnnnnnnnnnnnnnnnnnnnnnnnnnnnnnnnnnnnnnnnnnnnnnnnnnnnnnnnnnnnnnnnnnnnnnnnnnnnnnnnnnnnnnnnnnnnnnnnnnnnnnnnnnnnnnnnnnnnnnnnnnnnnnnnnnnnnnnnnnnnnnnnnnnnnnnnnnnnnnnnnnnnnnnnnnnnnnnnnnnnnnnnnnnnnnnnnnnnnnnnnnnnnnnnnnnnnnnnnnnnnnnnnnnnnnnnnnnnnnnnnnnnnnnnnnnnnnnnnnnnnnnnnnnnnnnnnnnnnnnnnnnnnnnnnnnnnnnnnnnnnnnnnnnnnnnnnnnnnnnnnnnnnnnnnnnnnnnnnnnnnnnnnnnnnnnnnnnnnnnnnnnnnnnnnnnnnnnnnnnnnnnnnnnnnnnnnnnnnnnnnnnnnnnnnnnnnnnnnnnnnnnnnnnnnnnnnnnnnnnnnnnnnnnnnnnnnnnnnnnnnnnnnnnnnnnnnnnnnnnnnnnnnnnnnnnnnnnnnnnnnnnnnnnnnnnnnnnnnnnnnnnnnnnnnnnnnnnnnnnnnnnnnnnnnnnnnnnnnnnnnnnnnnnnnnnnnnnnnnnnnnnnnnnnnnnnnnnnnnnnnnnnnnnnnnnnnnnnnnnnnnnnnnnnnnnnnnnnnnnnnnnnnnnnnnnnnnnnnnnnnnnnnnnnnnnnnnnnnnnnnnnnnnnnnnnnnnnnnnnnnnnnnnnnnnnnnnnnnnnnnnnnnnnnnnnnnnnnnnnnnnnnnnnnnnnnnnnnnnnnnnnnnnnnnnnnnnnnnnnnnnnnnnnnnnnnnnnnnnnnnnnnnnnnnnnnnnnnnnnnnnnnnnnnnnnnnnnnnnnnnnnnnnnnnnnnnnnnnnnnnnnnnnnnnnnnnnnnnnnnnnnnnnnnnnnnnnnnnnnnnnnnnnnnnnnnnnnnnnnnnnnnnnnnnnnnnnnnnnnnnnnnnnnnnnnnnnnnnnnnnnnnnnnnnnnnnnnnnnnnnnnnnnnnnnnnnnnnnnnnnnnnnnnnnnnnnnnnnnnnnnnnnnnnnnnnnnnnnnnnnnnnnnnnnnnnnnnnnnnnnnnnnnnnnnnnnnnnnnnnnnnnnnnnnnnnnnnnnnnnnnnnnnnnnnnnnnnnnnnnnnnnnnnnnnnnnnnnnnnnnnnnnnnnnnnnnnnnnnnnnnnnnnnnnnnnnnnnnnnnnnnnnnnnnnnnnnnnnnnnnnnnnnnnnnnnnnnnnnnnnnnnnnnnnnnnnnnnnnnnnnnnnnnnnnnnnnnnnnnnnnnnnnnnnnnnnnnnnnnnnnnnnnnnnnnnnnnnnnnnnnnnnnnnnnnnnnnnnnnnnnnnnnnnnnnnnnnnnnnnnnnnnnnnnnnnnnnnnnnnnnnnnnnnnnnnnnnnnnnnnnnnnnnnnnnnnnnnnnnnnnnnnnnnnnnnnnnnnnnnnnnnnnnnnnnnnnnnnnnnnnnnnnnnnnnnnnnnnnnnnnnnnnnnnnnnnnnnnnnnnnnnnnnnnnnnnnnnnnnnnnnnnnnnnnnnnnnnnnnnnnnnnnnnnnnnnnnnnnnnnnnnnnnnnnnnnnnnnnnnnnnnnnnnnnnnnnnnnnnnnnnnnnnnnnnnnnnnnnnnnnnnnnnnnnnnnnnnnnnnnnnnnnnnnnnnnnnnnnnnnnnnnnnnnnnnnnnnnnnnnnnnnnnnnnnnnnnnnnnnnnnnnnnnnnnnnnnnnnnnnnnnnnnnnnnnnnnnnnnnnnnnnnnnnnnnnnnnnnnnnnnnnnnnnnnnnnnnnnnnnnnnnnnnnnnnnnnnnnnnnnnnnnnnnnnnnnnnnnnnnnnnnnnnnnnnnnnnnnnnnnnnnnnnnnnnnnnnnnnnnnnnnnnnnnnnnnnnnnnnnnnnnnnnnnnnnnnnnnnnnnnnnnnnnnnnnnnnnnnnnnnnnnnnnnnnnnnnnnnnnnnnnnnnnnnnnnnnnnnnnnnnnnnnnnnnnnnnnnnnnnnnnnnnnnnnnnnnnnnnnnnnnnnnnnnnnnnnnnnnnnnnnnnnnnnnnnnnnnnnnnnnnnnnnnnnnnnnnnnnnnnnnnnnnnnnnnnnnnnnnnnnnnnnnnnnnnnnnnnnnnnnnnnnnnnnnnnnnnnnnnnnnnnnnnnnnnnnnnnnnnnnnnnnnnnnnnnnnnnnnnnnnnnnnnnnnnnnnnnnnnnnnnnnnnnnnnnnnnnnnnnnnnnnnnnnnnnnnnnnnnnnnnnnnnnnnnnnnnnnnnnnnnnnnnnnnnnnnnnnnnnnnnnnnnnnnnnnnnnnnnnnnnnnnnnnnnnnnnnnnnnnnnnnnnnnnnnnnnnnnnnnnnnnnnnnnnnnnnnnnnnnnnnnnnnnnnnnnnnnnnnnnnnnnnnnnnnnnnnnnnnnnnnnnnnnnnnnnnnnnnnnnnnnnnnnnnnnnnnnnnnnnnnnnnnnnnnnnnnnnnnnnnnnnnnnnnnnnnnnnnnnnnnnnnnnnnnnnnnnnnnnnnnnnnnnnnnnnnnnnnnnnnnnnnnnnnnnnnnnnnnnnnnnnnnnnnnnnnnnnnnnnnnnnnnnnnnnnnnnnnnnnnnnnnnnnnnnnnnnnnnnnnnnnnnnnnnnnnnnnnnnnnnnnnnnnnnnnnnnnnnnnnnnnnnnnnnnnnnnnnnnnnnnnnnnnnnnnnnnnnnnnnnnnnnnnnnnnnnnnnnnnnnnnnnnnnnnnnnnnnnnnnnnnnnnnnnnnnnnnnnnnnnnnnnnnnnnnnnnnnnnnnnnnnnnnnnnnnnnnnnnnnnnnnnnnnnnnnnnnnnnnnnnnnnnnnnnnnnnnnnnnnnnnnnnnnnnnnnnnnnnnnnnnnnnnnnnnnnnnnnnnnnnnnnnnnnnnnnnnnnnnnnnnnnnnnnnnnnnnnnnnnnnnnnnnnnnnnnnnnnnnnnnnnnnnnnnnnnnnnnnnnnnnnnnnnnnnnnnnnnnnnnnnnnnnnnnnnnnnnnnnnnnnnnnnnnnnnnnnnnnnnnnnnnnnnnnnnnnnnnnnnnnnnnnnnnnnnnnnnnnnnnnnnnnnnnnnnnnnnnnnnnnnnnnnnnnnnnnnnnnnnnnnnnnnnnnnnnnnnnnnnnnnnnnnnnnnnnnnnnnnnnnnnnnnnnnnnnnnnnnnnnnnnnnnnnnnnnnnnnnnnnnnnnnnnnnnnnnnnnnnnnnnnnnnnnnnnnnnnnnnnnnnnnnnnnnnnnnnnnnnnnnnnnnnnnnnnnnnnnnnnnnnnnnnnnnnnnnnnnnnnnnnnnnnnnnnnnnnnnnnnnnnnnnnnnnnnnnnnnnnnnnnnnnnnnnnnnnnnnnnnnnnnnnnnnnnnnnnnnnnnnnnnnnnnnnnnnnnnnnnnnnnnnnnnnnnnnnnnnnnnnnnnnnnnnnnnnnnnnnnnnnnnnnnnnnnnnnnnnnnnnnnnnnnnnnnnnnnnnnnnnnnnnnnnnnnnnnnnnnnnnnnnnnnnnnnnnnnnnnnnnnnnnnnnnnnnnnnnnnnnnnnnnnnnnnnnnnnnnnnnnnnnnnnnnnnnnnnnnnnnnnnnnnnnnnnnnnnnnnnnnnnnnnnnnnnnnnnnnnnnnnnnnnnnnnnnnnnnnnnnnnnnnnnnnnnnnnnnnnnnnnnnnnnnnnnnnnnnnnnnnnnnnnnnnnnnnnnnnnnnnnnnnnnnnnnnnnnnnnnnnnnnnnnnnnnnnnnnnnnnnnnnnnnnnnnnnnnnnnnnnnnnnnnnnnnnnnnnnnnnnnnnnnnnnnnnnnnnnnnnnnnnnnnnnnnnnnnnnnnnnnnnnnnnnnnnnnnnnnnnnnnnnnnnnnnnnnnnnnnnnnnnnnnnnnnnnnnnnnnnnnnnnnnnnnnnnnnnnnnnnnnnnnnnnnnnnnnnnnnnnnnnnnnnnnnnnnnnnnnnnnnnnnnnnnnnnnnnnnnnnnnnnnnnnnnnnnnnnnnnnnnnnnnnnnnnnnnnnnnnnnnnnnnnnnnnnnnnnnnnnnnnnnnnnnnnnnnnnnnnnnnnnnnnnnnnnnnnnnnnnnnnnnnnnnnnnnnnnnnnnnnnnnnnnnnnnnnnnnnnnnnnnnnnnnnnnnnnnnnnnnnnnnnnnnnnnnnnnnnnnnnnnnnnnnnnnnnnnnnnnnnnnnnnnnnnnnnnnnnnnnnnnnnnnnnnnnnnnnnnnnnnnnnnnnnnnnnnnnnnnnnnnnnnnnnnnnnnnnnnnnnnnnnnnnnnnnnnnnnnnnnnnnnnnnnnnnnnnnnnnnnnnnnnnnnnnnnnnnnnnnnnnnnnnnnnnnnnnnnnnnnnnnnnnnnnnnnnnnnnnnnnnnnnnnnnnnnnnnnnnnnnnnnnnnnnnnnnnnnnnnnnnnnnnnnnnnnnnnnnnnnnnnnnnnnnnnnnnnnnnnnnnnnnnnnnnnnnnnnnnnnnnnnnnnnnnnnnnnnnnnnnnnnnnnnnnnnnnnnnnnnnnnnnnnnnnnnnnnnnnnnnnnnnnnnnnnnnnnnnnnnnnnnnnnnnnnnnnnnnnnnnnnnnnnnnnnnnnnnnnnnnnnnnnnnnnnnnnnnnnnnnnnnnnnnnnnnnnnnnnnnnnnnnnnnnnnnnnnnnnnnnnnnnnnnnnnnnnnnnnnnnnnnnnnnnnnnnnnnnnnnnnnnnnnnnnnnnnnnnnnnnnnnnnnnnnnnnnnnnnnnnnnnnnnnnnnnnnnnnnnnnnnnnnnnnnnnnnnnnnnnnnnnnnnnnnnnnnnnnnnnnnnnnnnnnnnnnnnnnnnnnnnnnnnnnnnnnnnnnnnnnnnnnnnnnnnnnnnnnnnnnnnnnnnnnnnnnnnnnnnnnnnnnnnnnnnnnnnnnnnnnnnnnnnnnnnnnnnnnnnnnnnnnnnnnnnnnnnnnnnnnnnnnnnnnnnnnnnnnnnnnnnnnnnnnnnnnnnnnnnnnnnnnnnnnnnnnnnnnnnnnnnnnnnnnnnnnnnnnnnnnnnnnnnnnnnnnnnnnnnnnnnnnnnnnnnnnnnnnnnnnnnnnnnnnnnnnnnnnnnnnnnnnnnnnnnnnnnnnnnnnnnnnnnnnnnnnnnnnnnnnnnnnnnnnnnnnnnnnnnnnnnnnnnnnnnnnnnnnnnnnnnnnnnnnnnnnnnnnnnnnnnnnnnnnnnnnnnnnnnnnnnnnnnnnnnnnnnnnnnnnnnnnnnnnnnnnnnnnnnnnnnnnnnnnnnnnnnnnnnnnnnnnnnnnnnnnnnnnnnnnnnnnnnnnnnnnnnnnnnnnnnnnnnnnnnnnnnnnnnnnnnnnnnnnnnnnnnnnnnnnnnnnnnnnnnnnnnnnnnnnnnnnnnnnnnnnnnnnnnnnnnnnnnnnnnnnnnnnnnnnnnnnnnnnnnnnnnnnnnnnnnnnnnnnnnnnnnnnnnnnnnnnnnnnnnnnnnnnnnnnnnnnnnnnnnnnnnnnnnnnnnnnnnnnnnnnnnnnnnnnnnnnnnnnnnnnnnnnnnnnnnnnnnnnnnnnnnnnnnnnnnnnnnnnnnnnnnnnnnnnnnnnnnnnnnnnnnnnnnnnnnnnnnnnnnnnnnnnnnnnnnnnnnnnnnnnnnnnnnnnnnnnnnnnnnnnnnnnnnnnnnnnnnnnnnnnnnnnnnnnnnnnnnnnnnnnnnnnnnnnnnnnnnnnnnnnnnnnnnnnnnnnnnnnnnnnnnnnnnnnnnnnnnnnnnnnnnnnnnnnnnnnnnnnnnnnnnnnnnnnnnnnnnnnnnnnnnnnnnnnnnnnnnnnnnnnnnnnnnnnnnnnnnnnnnnnnnnnnnnnnnnnnnnnnnnnnnnnnnnnnnnnnnnnnnnnnnnnnnnnnnnnnnnnnnnnnnnnnnnnnnnnnnnnnnnnnnnnnnnnnnnnnnnnnnnnnnnnnnnnnnnnnnnnnnnnnnnnnnnnnnnnnnnnnnnnnnnnnnnnnnnnnnnnnnnnnnnnnnnnnnnnnnnnnnnnnnnnnnnnnnnnnnnnnnnnnnnnnnnnnnnnnnnnnnnnnnnnnnnnnnnnnnnnnnnnnnnnnnnnnnnnnnnnnnnnnnnnnnnnnnnnnnnnnnnnnnnnnnnnnnnnnnnnnnnnnnnnnnnnnnnnnnnnnnnnnnnnnnnnnnnnnnnnnnnnnnnnnnnnnnnnnnnnnnnnnnnnnnnnnnnnnnnnnnnnnnnnnnnnnnnnnnnnnnnnnnnnnnnnnnnnnnnnnnnnnnnnnnnnnnnnnnnnnnnnnnnnnnnnnnnnnnnnnnnnnnnnnnnnnnnnnnnnnnnnnnnnnnnnnnnnnnnnnnnnnnnnnnnnnnnnnnnnnnnnnnnnnnnnnnnnnnnnnnnnnnnnnnnnnnnnnnnnnnnnnnnnnnnnnnnnnnnnnnnnnnnnnnnnnnnnnnnnnnnnnnnnnnnnnnnnnnnnnnnnnnnnnnnnnnnnnnnnnnnnnnnnnnnnnnnnnnnnnnnnnnnnnnnnnnnnnnnnnnnnnnnnnnnnnnnnnnnnnnnnnnnnnnnnnnnnnnnnnnnnnnnnnnnnnnnnnnnnnnnnnnnnnnnnnnnnnnnnnnnnnnnnnnnnnnnnnnnnnnnnnnnnnnnnnnnnnnnnnnnnnnnnnnnnnnnnnnnnnnnnnnnnnnnnnnnnnnnnnnnnnnnnnnnnnnnnnnnnnnnnnnnnnnnnnnnnnnnnnnnnnnnnnnnnnnnnnnnnnnnnnnnnnnnnnnnnnnnnnnnnnnnnnnnnnnnnnnnnnnnnnnnnnnnnnnnnnnnnnnnnnnnnnnnnnnnnnnnnnnnnnnnnnnnnnnnnnnnnnnnnnnnnnnnnnnnnnnnnnnnnnnnnnnnnnnnnnnnnnnnnnnnnnnnnnnnnnnnnnnnnnnnnnnnnnnnnnnnnnnnnnnnnnnnnnnnnnnnnnnnnnnnnnnnnnnnnnnnnnnnnnnnnnnnnnnnnnnnnnnnnnnnnnnnnnnnnnnnnnnnnnnnnnnnnnnnnnnnnnnnnnnnnnnnnnnnnnnnnnnnnnnnnnnnnnnnnnnnnnnnnnnnnnnnnnnnnnnnnnnnnnnnnnnnnnnnnnnnnnnnnnnnnnnnnnnnnnnnnnnnnnnnnnnnnnnnnnnnnnnnnnnnnnnnnnnnnnnnnnnnnnnnnnnnnnnnnnnnnnnnnnnnnnnnnnnnnnnnnnnnnnnnnnnnnnnnnnnnnnnnnnnnnnnnnnnnnnnnnnnnnnnnnnnnnnnnnnnnnnnnnnnnnnnnnnnnnnnnnnnnnnnnnnnnnnnnnnnnnnnnnnnnnnnnnnnnnnnnnnnnnnnnnnnnnnnnnnnnnnnnnnnnnnnnnnnnnnnnnnnnnnnnnnnnnnnnnnnnnnnnnnnnnnnnnnnnnnnnnnnnnnnnnnnnnnnnnnnnnnnnnnnnnnnnnnnnnnnnnnnnnnnnnnnnnnnnnnnnnnnnnnnnnnnnnnnnnnnnnnnnnnnnnnnnnnnnnnnnnnnnnnnnnnnnnnnnnnnnnnnnnnnnnnnnnnnnnnnnnnnnnnnnnnnnnnnnnnnnnnnnnnnnnnnnnnnnnnnnnnnnnnnnnnnnnnnnnnnnnnnnnnnnnnnnnnnnnnnnnnnnnnnnnnnnnnnnnnnnnnnnnnnnnnnnnnnnnnnnnnnnnnnnnnnnnnnnnnnnnnnnnnnnnnnnnnnnnnnnnnnnnnnnnnnnnnnnnnnnnnnnnnnnnnnnnnnnnnnnnnnnnnnnnnnnnnnnnnnnnnnnnnnnnnnnnnnnnnnnnnnnnnnnnnnnnnnnnnnnnnnnnnnnnnnnnnnnnnnnnnnnnnnnnnnnnnnnnnnnnnnnnnnnnnnnnnnnnnnnnnnnnnnnnnnnnnnnnnnnnnnnnnnnnnnnnnnnnnnnnnnnnnnnnnnnnnnnnnnnnnnnnnnnnnnnnnnnnnnnnnnnnnnnnnnnnnnnnnnnnnnnnnnnnnnnnnnnnnnnnnnnnnnnnnnnnnnnnnnnnnnnnnnnnnnnnnnnnnnnnnnnnnnnnnnnnnnnnnnnnnnnnnnnnnnnnnnnnnnnnnnnnnnnnnnnnnnnnnnnnnnnnnnnnnnnnnnnnnnnnnnnnnnnnnnnnnnnnnnnnnnnnnnnnnnnnnnnnnnnnnnnnnnnnnnnnnnnnnnnnnnnnnnnnnnnnnnnnnnnnnnnnnnnnnnnnnnnnnnnnnnnnnnnnnnnnnnnnnnnnnnnnnnnnnnnnnnnnnnnnnnnnnnnnnnnnnnnnnnnnnnnnnnnnnnnnnnnnnnnnnnnnnnnnnnnnnnnnnnnnnnnnnnnnnnnnnnnnnnnnnnnnnnnnnnnnnnnnnnnnnnnnnnnnnnnnnnnnnnnnnnnnnnnnnnnnnnnnnnnnnnnnnnnnnnnnnnnnnnnnnnnnnnnnnnnnnnnnnnnnnnnnnnnnnnnnnnnnnnnnnnnnnnnnnnnnnnnnnnnnnnnnnnnnnnnnnnnnnnnnnnnnnnnnnnnnnnnnnnnnnnnnnnnnnnnnnnnnnnnnnnnnnnnnnnnnnnnnnnnnnnnnnnnnnnnnnnnnnnnnnnnnnnnnnnnnnnnnnnnnnnnnnnnnnnnnnnnnnnnnnnnnnnnnnnnnnnnnnnnnnnnnnnnnnnnnnnnnnnnnnnnnnnnnnnnnnnnnnnnnnnnnnnnnnnnnnnnnnnnnnnnnnnnnnnnnnnnnnnnnnnnnnnnnnnnnnnnnnnnnnnnnnnnnnnnnnnnnnnnnnnnnnnnnnnnnnnnnnnnnnnnnnnnnnnnnnnnnnnnnnnnnnnnnnnnnnnnnnnnnnnnnnnnnnnnnnnnnnnnnnnnnnnnnnnnnnnnnnnnnnnnnnnnnnnnnnnnnnnnnnnnnnnnnnnnnnnnnnnnnnnnnnnnnnnnnnnnnnnnnnnnnnnnnnnnnnnnnnnnnnnnnnnnnnnnnnnnnnnnnnnnnnnnnnnnnnnnnnnnnnnnnnnnnnnnnnnnnnnnnnnnnnnnnnnnnnnnnnnnnnnnnnnnnnnnnnnnnnnnnnnnnnnnnnnnnnnnnnnnnnnnnnnnnnnnnnnnnnnnnnnnnnnnnnnnnnnnnnnnnnnnnnnnnnnnnnnnnnnnnnnnnnnnnnnnnnnnnnnnnnnnnnnnnnnnnnnnnnnnnnnnnnnnnnnnnnnnnnnnnnnnnnnnnnnnnnnnnnnnnnnnnnnnnnnnnnnnnnnnnnnnnnnnnnnnnnnnnnnnnnnnnnnnnnnnnnnnnnnnnnnnnnnnnnnnnnnnnnnnnnnnnnnnnnnnnnnnnnnnnnnnnnnnnnnnnnnnnnnnnnnnnnnnnnnnnnnnnnnnnnnnnnnnnnnnnnnnnnnnnnnnnnnnnnnnnnnnnnnnnnnnnnnnnnnnnnnnnnnnnnnnnnnnnnnnnnnnnnnnnnnnnnnnnnnnnnnnnnnnnnnnnnnnnnnnnnnnnnnnnnnnnnnnnnnnnnnnnnnnnnnnnnnnnnnnnnnnnnnnnnnnnnnnnnnnnnnnnnnnnnnnnnnnnnnnnnnnnnnnnnnnnnnnnnnnnnnnnnnnnnnnnnnnnnnnnnnnnnnnnnnnnnnnnnnnnnnnnnnnnnnnnnnnnnnnnnnnnnnnnnnnnnnnnnnnnnnnnnnnnnnnnnnnnnnnnnnnnnnnnnnnnnnnnnnnnnnnnnnnnnnnnnnnnnnnnnnnnnnnnnnnnnnnnnnnnnnnnnnnnnnnnnnnnnnnnnnnnnnnnnnnnnnnnnnnnnnnnnnnnnnnnnnnnnnnnnnnnnnnnnnnnnnnnnnnnnnnnnnnnnnnnnnnnnnnnnnnnnnnnnnnnnnnnnnnnnnnnnnnnnnnnnnnnnnnnnnnnnnnnnnnnnnnnnnnnnnnnnnnnnnnnnnnnnnnnnnnnnnnnnnnnnnnnnnnnnnnnnnnnnnnnnnnnnnnnnnnnnnnnnnnnnnnnnnnnnnnnnnnnnnnnnnnnnnnnnnnnnnnnnnnnnnnnnnnnnnnnnnnnnnnnnnnnnnnnnnnnnnnnnnnnnnnnnnnnnnnnnnnnnnnnnnnnnnnnnnnnnnnnnnnnnnnnnnnnnnnnnnnnnnnnnnnnnnnnnnnnnnnnnnnnnnnnnnnnnnnnnnnnnnnnnnnnnnnnnnnnnnnnnnnnnnnnnnnnnnnnnnnnnnnnnnnnnnnnnnnnnnnnnnnnnnnnnnnnnnnnnnnnnnnnnnnnnnnnnnnnnnnnnnnnnnnnnnnnnnnnnnnnnnnnnnnnnnnnnnnnnnnnnnnnnnnnnnnnnnnnnnnnnnnnnnnnnnnnnnnnnnnnnnnnnnnnnnnnnnnnnnnnnnnnnnnnnnnnnnnnnnnnnnnnnnnnnnnnnnnnnnnnnnnnnnnnnnnnnnnnnnnnnnnnnnnnnnnnnnnnnnnnnnnnnnnnnnnnnnnnnnnnnnnnnnnnnnnnnnnnnnnnnnnnnnnnnnnnnnnnnnnnnnnnnnnnnnnnnnnnnnnnnnnnnnnnnnnnnnnnnnnnnnnnnnnnnnnnnnnnnnnnnnnnnnnnnnnnnnnnnnnnnnnnnnnnnnnnnnnnnnnnnnnnnnnnnnnnnnnnnnnnnnnnnnnnnnnnnnnnnnnnnnnnnnnnnnnnnnnnnnnnnnnnnnnnnnnnnnnnnnnnnnnnnnnnnnnnnnnnnnnnnnnnnnnnnnnnnnnnnnnnnnnnnnnnnnnnnnnnnnnnnnnnnnnnnnnnnnnnnnnnnnnnnnnnnnnnnnnnnnnnnnnnnnnnnnnnnnnnnnnnnnnnnnnnnnnnnnnnnnnnnnnnnnnnnnnnnnnnnnnnnnnnnnnnnnnnnnnnnnnnnnnnnnnnnnnnnnnnnnnnnnnnnnnnnnnnnnnnnnnnnnnnnnnnnnnnnnnnnnnnnnnnnnnnnnnnnnnnnnnnnnnnnnnnnnnnnnnnnnnnnnnnnnnnnnnnnnnnnnnnnnnnnnnnnnnnnnnnnnnnnnnnnnnnnnnnnnnnnnnnnnnnnnnnnnnnnnnnnnnnnnnnnnnnnnnnnnnnnnnnnnnnnnnnnnnnnnnnnnnnnnnnnnnnnnnnnnnnnnnnnnnnnnnnnnnnnnnnnnnnnnnnnnnnnnnnnnnnnnnnnnnnnnnnnnnnnnnnnnnnnnnnnnnnnnnnnnnnnnnnnnnnnnnnnnnnnnnnnnnnnnnnnnnnnnnnnnnnnnnnnnnnnnnnnnnnnnnnnnnnnnnnnnnnnnnnnnnnnnnnnnnnnnnnnnnnnnnnnnnnnnnnnnnnnnnnnnnnnnnnnnnnnnnnnnnnnnnnnnnnnnnnnnnnnnnnnnnnnnnnnnnnnnnnnnnnnnnnnnnnnnnnnnnnnnnnnnnnnnnnnnnnnnnnnnnnnnnnnnnnnnnnnnnnnnnnnnnnnnnnnnnnnnnnnnnnnnnnnnnnnnnnnnnnnnnnnnnnnnnnnnnnnnnnnnnnnnnnnnnnnnnnnnnnnnnnnnnnnnnnnnnnnnnnnnnnnnnnnnnnnnnnnnnnnnnnnnnnnnnnnnnnnnnnnnnnnnnnnnnnnnnnnnnnnnnnnnnnnnnnnnnnnnnnnnnnnnnnnnnnnnnnnnnnnnnnnnnnnnnnnnnnnnnnnnnnnnnnnnnnnnnnnnnnnnnnnnnnnnnnnnnnnnnnnnnnnnnnnnnnnnnnnnnnnnnnnnnnnnnnnnnnnnnnnnnnnnnnnnnnnnnnnnnnnnnnnnnnnnnnnnnnnnnnnnnnnnnnnnnnnnnnnnnnnnnnnnnnnnnnnnnnnnnnnnnnnnnnnnnnnnnnnnnnnnnnnnnnnnnnnnnnnnnnnnnnnnnnnnnnnnnnnnnnnnnnnnnnnnnnnnnnnnnnnnnnnnnnnnnnnnnnnnnnnnnnnnnnnnnnnnnnnnnnnnnnnnnnnnnnnnnnnnnnnnnnnnnnnnnnnnnnnnnnnnnnnnnnnnnnnnnnnnnnnnnnnnnnnnnnnnnnnnnnnnnnnnnnnnnnnnnnnnnnnnnnnnnnnnnnnnnnnnnnnnnnnnnnnnnnnnnnnnnnnnnnnnnnnnnnnnnnnnnnnnnnnnnnnnnnnnnnnnnnnnnnnnnnnnnnnnnnnnnnnnnnnnnnnnnnnnnnnnnnnnnnnnnnnnnnnnnnnnnnnnnnnnnnnnnnnnnnnnnnnnnnnnnnnnnnnnnnnnnnnnnnnnnnnnnnnnnnnnnnnnnnnnnnnnnnnnnnnnnnnnnnnnnnnnnnnnnnnnnnnnnnnnnnnnnnnnnnnnnnnnnnnnnnnnnnnnnnnnnnnnnnnnnnnnnnnnnnnnnnnnnnnnnnnnnnnnnnnnnnnnnnnnnnnnnnnnnnnnnnnnnnnnnnnnnnnnnnnnnnnnnnnnnnnnnnnnnnnnnnnnnnnnnnnnnnnnnnnnnnnnnnnnnnnnnnnnnnnnnnnnnnnnnnnnnnnnnnnnnnnnnnnnnnnnnnnnnnnnnnnnnnnnnnnnnnnnnnnnnnnnnnnnnnnnnnnnnnnnnnnnnnnnnnnnnnnnnnnnnnnnnnnnnnnnnnnnnnnnnnnnnnnnnnnnnnnnnnnnnnnnnnnnnnnnnnnnnnnnnnnnnnnnnnnnnnnnnnnnnnnnnnnnnnnnnnnnnnnnnnnnnnnnnnnnnnnnnnnnnnnnnnnnnnnnnnnnnnnnnnnnnnnnnnnnnnnnnnnnnnnnnnnnnnnnnnnnnnnnnnnnnnnnnnnnnnnnnnnnnnnnnnnnnnnnnnnnnnnnnnnnnnnnnnnnnnnnnnnnnnnnnnnnnnnnnnnnnnnnnnnnnnnnnnnnnnnnnnnnnnnnnnnnnnnnnnnnnnnnnnnnnnnnnnnnnnnnnnnnnnnnnnnnnnnnnnnnnnnnnnnnnnnnnnnnnnnnnnnnnnnnnnnnnnnnnnnnnnnnnnnnnnnnnnnnnnnnnnnnnnnnnnnnnnnnnnnnnnnnnnnnnnnnnnnnnnnnnnnnnnnnnnnnnnnnnnnnnnnnnnnnnnnnnnnnnnnnnnnnnnnnnnnnnnnnnnnnnnnnnnnnnnnnnnnnnnnnnnnnnnnnnnnnnnnnnnnnnnnnnnnnnnnnnnnnnnnnnnnnnnnnnnnnnnnnnnnnnnnnnnnnnnnnnnnnnnnnnnnnnnnnnnnnnnnnnnnnnnnnnnnnnnnnnnnnnnnnnnnnnnnnnnnnnnnnnnnnnnnnnnnnnnnnnnnnnnnnnnnnnnnnnnnnnnnnnnnnnnnnnnnnnnnnnnnnnnnnnnnnnnnnnnnnnnnnnnnnnnnnnnnnnnnnnnnnnnnnnnnnnnnnnnnnnnnnnnnnnnnnnnnnnnnnnnnnnnnnnnnnnnnnnnnnnnnnnnnnnnnnnnnnnnnnnnnnnnnnnnnnnnnnnnnnnnnnnnnnnnnnnnnnnnnnnnnnnnnnnnnnnnnnnnnnnnnnnnnnnnnnnnnnnnnnnnnnnnnnnnnnnnnnnnnnnnnnnnnnnnnnnnnnnnnnnnnnnnnnnnnnnnnnnnnnnnnnnnnnnnnnnnnnnnnnnnnnnnnnnnnnnnnnnnnnnnnnnnnnnnnnnnnnnnnnnnnnnnnnnnnnnnnnnnnnnnnnnnnnnnnnnnnnnnnnnnnnnnnnnnnnnnnnnnnnnnnnnnnnnnnnnnnnnnnnnnnnnnnnnnnnnnnnnnnnnnnnnnnnnnnnnnnnnnnnnnnnnnnnnnnnnnnnnnnnnnnnnnnnnnnnnnnnnnnnnnnnnnnnnnnnnnnnnnnnnnnnnnnnnnnnnnnnnnnnnnnnnnnnnnnnnnnnnnnnnnnnnnnnnnnnnnnnnnnnnnnnnnnnnnnnnnnnnnnnnnnnnnnnnnnnnnnnnnnnnnnnnnnnnnnnnnnnnnnnnnnnnnnnnnnnnnnnnnnnnnnnnnnnnnnnnnnnnnnnnnnnnnnnnnnnnnnnnnnnnnnnnnnnnnnnnnnnnnnnnnnnnnnnnnnnnnnnnnnnnnnnnnnnnnnnnnnnnnnnnnnnnnnnnnnnnnnnnnnnnnnnnnnnnnnnnnnnnnnnnnnnnnnnnnnnnnnnnnnnnnnnnnnnnnnnnnnnnnnnnnnnnnnnnnnnnnnnnnnnnnnnnnnnnnnnnnnnnnnnnnnnnnnnnnnnnnnnnnnnnnnnnnnnnnnnnnnnnnnnnnnnnnnnnnnnnnnnnnnnnnnnnnnnnnnnnnnnnnnnnnnnnnnnnnnnnnnnnnnnnnnnnnnnnnnnnnnnnnnnnnnnnnnnnnnnnnnnnnnnnnnnnnnnnnnnnnnnnnnnnnnnnnnnnnnnnnnnnnnnnnnnnnnnnnnnnnnnnnnnnnnnnnnnnnnnnnnnnnnnnnnnnnnnnnnnnnnnnnnnnnnnnnnnnnnnnnnnnnnnnnnnnnnnnnnnnnnnnnnnnnnnnnnnnnnnnnnnnnnnnnnnnnnnnnnnnnnnnnnnnnnnnnnnnnnnnnnnnnnnnnnnnnnnnnnnnnnnnnnnnnnnnnnnnnnnnnnnnnnnnnnnnnnnnnnnnnnnnnnnnnnnnnnnnnnnnnnnnnnnnnnnnnnnnnnnnnnnnnnnnnnnnnnnnnnnnnnnnnnnnnnnnnnnnnnnnnnnnnnnnnnnnnnnnnnnnnnnnnnnnnnnnnnnnnnnnnnnnnnnnnnnnnnnnnnnnnnnnnnnnnnnnnnnnnnnnnnnnnnnnnnnnnnnnnnnnnnnnnnnnnnnnnnnnnnnnnnnnnnnnnnnnnnnnnnnnnnnnnnnnnnnnnnnnnnnnnnnnnnnnnnnnnnnnnnnnnnnnnnnnnnnnnnnnnnnnnnnnnnnnnnnnnnnnnnnnnnnnnnnnnnnnnnnnnnnnnnnnnnnnnnnnnnnnnnnnnnnnnnnnnnnnnnnnnnnnnnnnnnnnnnnnnnnnnnnnnnnnnnnnnnnnnnnnnnnnnnnnnnnnnnnnnnnnnnnnnnnnnnnnnnnnnnnnnnnnnnnnnnnnnnnnnnnnnnnnnnnnnnnnnnnnnnnnnnnnnnnnnnnnnnnnnnnnnnnnnnnnnnnnnnnnnnnnnnnnnnnnnnnnnnnnnnnnnnnnnnnnnnnnnnnnnnnnnnnnnnnnnnnnnnnnnnnnnnnnnnnnnnnnnnnnnnnnnnnnnnnnnnnnnnnnnnnnnnnnnnnnnnnnnnnnnnnnnnnnnnnnnnnnnnnnnnnnnnnnnnnnnnnnnnnnnnnnnnnnnnnnnnnnnnnnnnnnnnnnnnnnnnnnnnnnnnnnnnnnnnnnnnnnnnnnnnnnnnnnnnnnnnnnnnnnnnnnnnnnnnnnnnnnnnnnnnnnnnnnnnnnnnnnnnnnnnnnnnnnnnnnnnnnnnnnnnnnnnnnnnnnnnnnnnnnnnnnnnnnnnnnnnnnnnnnnnnnnnnnnnnnnnnnnnnnnnnnnnnnnnnnnnnnnnnnnnnnnnnnnnnnnnnnnnnnnnnnnnnnnnnnnnnnnnnnnnnnnnnnnnnnnnnnnnnnnnnnnnnnnnnnnnnnnnnnnnnnnnnnnnnnnnnnnnnnnnnnnnnnnnnnnnnnnnnnnnnnnnnnnnnnnnnnnnnnnnnnnnnnnnnnnnnnnnnnnnnnnnnnnnnnnnnnnnnnnnnnnnnnnnnnnnnnnnnnnnnnnnnnnnnnnnnnnnnnnnnnnnnnnnnnnnnnnnnnnnnnnnnnnnnnnnnnnnnnnnnnnnnnnnnnnnnnnnnnnnnnnnnnnnnnnnnnnnnnnnnnnnnnnnnnnnnnnnnnnnnnnnnnnnnnnnnnnnnnnnnnnnnnnnnnnnnnnnnnnnnnnnnnnnnnnnnnnnnnnnnnnnnnnnnnnnnnnnnnnnnnnnnnnnnnnnnnnnnnnnnnnnnnnnnnnnnnnnnnnnnnnnnnnnnnnnnnnnnnnnnnnnnnnnnnnnnnnnnnnnnnnnnnnnnnnnnnnnnnnnnnnnnnnnnnnnnnnnnnnnnnnnnnnnnnnnnnnnnnnnnnnnnnnnnnnnnnnnnnnnnnnnnnnnnnnnnnnnnnnnnnnnnnnnnnnnnnnnnnnnnnnnnnnnnnnnnnnnnnnnnnnnnnnnnnnnnnnnnnnnnnnnnnnnnnnnnnnnnnnnnnnnnnnnnnnnnnnnnnnnnnnnnnnnnnnnnnnnnnnnnnnnnnnnnnnnnnnnnnnnnnnnnnnnnnnnnnnnnnnnnnnnnnnnnnnnnnnnnnnnnnnnnnnnnnnnnnnnnnnnnnnnnnnnnnnnnnnnnnnnnnnnnnnnnnnnnnnnnnnnnnnnnnnnnnnnnnnnnnnnnnnnnnnnnnnnnnnnnnnnnnnnnnnnnnnnnnnnnnnnnnnnnnnnnnnnnnnnnnnnnnnnnnnnnnnnnnnnnnnnnnnnnnnnnnnnnnnnnnnnnnnnnnnnnnnnnnnnnnnnnnnnnnnnnnnnnnnnnnnnnnnnnnnnnnnnnnnnnnnnnnnnnnnnnnnnnnnnnnnnnnnnnnnnnnnnnnnnnnnnnnnnnnnnnnnnnnnnnnnnnnnnnnnnnnnnnnnnnnnnnnnnnnnnnnnnnnnnnnnnnnnnnnnnnnnnnnnnnnnnnnnnnnnnnnnnnnnnnnnnnnnnnnnnnnnnnnnnnnnnnnnnnnnnnnnnnnnnnnnnnnnnnnnnnnnnnnnnnnnnnnnnnnnnnnnnnnnnnnnnnnnnnnnnnnnnnnnnnnnnnnnnnnnnnnnnnnnnnnnnnnnnnnnnnnnnnnnnnnnnnnnnnnnnnnnnnnnnnnnnnnnnnnnnnnnnnnnnnnnnnnnnnnnnnnnnnnnnnnnnnnnnnnnnnnnnnnnnnnnnnnnnnnnnnnnnnnnnnnnnnnnnnnnnnnnnnnnnnnnnnnnnnnnnnnnnnnnnnnnnnnnnnnnnnnnnnnnnnnnnnnnnnnnnnnnnnnnnnnnnnnnnnnnnnnnnnnnnnnnnnnnnnnnnnnnnnnnnnnnnnnnnnnnnnnnnnnnnnnnnnnnnnnnnnnnnnnnnnnnnnnnnnnnnnnnnnnnnnnnnnnnnnnnnnnnnnnnnnnnnnnnnnnnnnnnnnnnnnnnnnnnnnnnnnnnnnnnnnnnnnnnnnnnnnnnnnnnnnnnnnnnnnnnnnnnnnnnnnnnnnnnnnnnnnnnnnnnnnnnnnnnnnnnnnnnnnnnnnnnnnnnnnnnnnnnnnnnnnnnnnnnnnnnnnnnnnnnnnnnnnnnnnnnnnnnnnnnnnnnnnnnnnnnnnnnnnnnnnnnnnnnnnnnnnnnnnnnnnnnnnnnnnnnnnnnnnnnnnnnnnnnnnnnnnnnnnnnnnnnnnnnnnnnnnnnnnnnnnnnnnnnnnnnnnnnnnnnnnnnnnnnnnnnnnnnnnnnnnnnnnnnnnnnnnnnnnnnnnnnnnnnnnnnnnnnnnnnnnnnnnnnnnnnnnnnnnnnnnnnnnnnnnnnnnnnnnnnnnnnnnnnnnnnnnnnnnnnnnnnnnnnnnnnnnnnnnnnnnnnnnnnnnnnnnnnnnnnnnnnnnnnnnnnnnnnnnnnnnnnnnnnnnnnnnnnnnnnnnnnnnnnnnnnnnnnnnnnnnnnnnnnnnnnnnnnnnnnnnnnnnnnnnnnnnnnnnnnnnnnnnnnnnnnnnnnnnnnnnnnnnnnnnnnnnnnnnnnnnnnnnnnnnnnnnnnnnnnnnnnnnnnnnnnnnnnnnnnnnnnnnnnnnnnnnnnnnnnnnnnnnnnnnnnnnnnnnnnnnnnnnnnnnnnnnnnnnnnnnnnnnnnnnnnnnnnnnnnnnnnnnnnnnnnnnnnnnnnnnnnnnnnnnnnnnnnnnnnnnnnnnnnnnnnnnnnnnnnnnnnnnnnnnnnnnnnnnnnnnnnnnnnnnnnnnnnnnnnnnnnnnnnnnnnnnnnnnnnnnnnnnnnnnnnnnnnnnnnnnnnnnnnnnnnnnnnnnnnnnnnnnnnnnnnnnnnnnnnnnnnnnnnnnnnnnnnnnnnnnnnnnnnnnnnnnnnnnnnnnnnnnnnnnnnnnnnnnnnnnnnnnnnnnnnnnnnnnnnnnnnnnnnnnnnnnnnnnnnnnnnnnnnnnnnnnnnnnnnnnnnnnnnnnnnnnnnnnnnnnnnnnnnnnnnnnnnnnnnnnnnnnnnnnnnnnnnnnnnnnnnnnnnnnnnnnnnnnnnnnnnnnnnnnnnnnnnnnnnnnnnnnnnnnnnnnnnnnnnnnnnnnnnnnnnnnnnnnnnnnnnnnnnnnnnnnnnnnnnnnnnnnnnnnnnnnnnnnnnnnnnnnnnnnnnnnnnnnnnnnnnnnnnnnnnnnnnnnnnnnnnnnnnnnnnnnnnnnnnnnnnnnnnnnnnnnnnnnnnnnnnnnnnnnnnnnnnnnnnnnnnnnnnnnnnnnnnnnnnnnnnnnnnnnnnnnnnnnnnnnnnnnnnnnnnnnnnnnnnnnnnnnnnnnnnnnnnnnnnnnnnnnnnnnnnnnnnnnnnnnnnnnnnnnnnnnnnnnnnnnnnnnnnnnnnnnnnnnnnnnnnnnnnnnnnnnnnnnnnnnnnnnnnnnnnnnnnnnnnnnnnnnnnnnnnnnnnnnnnnnnnnnnnnnnnnnnnnnnnnnnnnnnnnnnnnnnnnnnnnnnnnnnnnnnnnnnnnnnnnnnnnnnnnnnnnnnnnnnnnnnnnnnnnnnnnnnnnnnnnnnnnnnnnnnnnnnnnnnnnnnnnnnnnnnnnnnnnnnnnnnnnnnnnnnnnnnnnnnnnnnnnnnnnnnnnnnnnnnnnnnnnnnnnnnnnnnnnnnnnnnnnnnnnnnnnnnnnnnnnnnnnnnnnnnnnnnnnnnnnnnnnnnnnnnnnnnnnnnnnnnnnnnnnnnnnnnnnnnnnnnnnnnnnnnnnnnnnnnnnnnnnnnnnnnnnnnnnnnnnnnnnnnnnnnnnnnnnnnnnnnnnnnnnnnnnnnnnnnnnnnnnnnnnnnnnnnnnnnnnnnnnnnnnnnnnnnnnnnnnnnnnnnnnnnnnnnnnnnnnnnnnnnnnnnnnnnnnnnnnnnnnnnnnnnnnnnnnnnnnnnnnnnnnnnnnnnnnnnnnnnnnnnnnnnnnnnnnnnnnnnnnnnnnnnnnnnnnnnnnnnnnnnnnnnnnnnnnnnnnnnnnnnnnnnnnnnnnnnnnnnnnnnnnnnnnnnnnnnnnnnnnnnnnnnnnnnnnnnnnnnnnnnnnnnnnnnnnnnnnnnnnnnnnnnnnnnnnnnnnnnnnnnnnnnnnnnnnnnnnnnnnnnnnnnnnnnnnnnnnnnnnnnnnnnnnnnnnnnnnnnnnnnnnnnnnnnnnnnnnnnnnnnnnnnnnnnnnnnnnnnnnnnnnnnnnnnnnnnnnnnnnnnnnnnnnnnnnnnnnnnnnnnnnnnnnnnnnnnnnnnnnnnnnnnnnnnnnnnnnnnnnnnnnnnnnnnnnnnnnnnnnnnnnnnnnnnnnnnnnnnnnnnnnnnnnnnnnnnnnnnnnnnnnnnnnnnnnnnnnnnnnnnnnnnnnnnnnnnnnnnnnnnnnnnnnnnnnnnnnnnnnnnnnnnnnnnnnnnnnnnnnnnnnnnnnnnnnnnnnnnnnnnnnnnnnnnnnnnnnnnnnnnnnnnnnnnnnnnnnnnnnnnnnnnnnnnnnnnnnnnnnnnnnnnnnnnnnnnnnnnnnnnnnnnnnnnnnnnnnnnnnnnnnnnnnnnnnnnnnnnnnnnnnnnnnnnnnnnnnnnnnnnnnnnnnnnnnnnnnnnnnnnnnnnnnnnnnnnnnnnnnnnnnnnnnnnnnnnnnnnnnnnnnnnnnnnnnnnnnnnnnnnnnnnnnnnnnnnnnnnnnnnnnnnnnnnnnnnnnnnnnnnnnnnnnnnnnnnnnnnnnnnnnnnnnnnnnnnnnnnnnnnnnnnnnnnnnnnnnnnnnnnnnnnnnnnnnnnnnnnnnnnnnnnnnnnnnnnnnnnnnnnnnnnnnnnnnnnnnnnnnnnnnnnnnnnnnnnnnnnnnnnnnnnnnnnnnnnnnnnnnnnnnnnnnnnnnnnnnnnnnnnnnnnnnnnnnnnnnnnnnnnnnnnnnnnnnnnnnnnnnnnnnnnnnnnnnnnnnnnnnnnnnnnnnnnnnnnnnnnnnnnnnnnnnnnnnnnnnnnnnnnnnnnnnnnnnnnnnnnnnnnnnnnnnnnnnnnnnnnnnnnnnnnnnnnnnnnnnnnnnnnnnnnnnnnnnnnnnnnnnnnnnnnnnnnnnnnnnnnnnnnnnnnnnnnnnnnnnnnnnnnnnnnnnnnnnnnnnnnnnnnnnnnnnnnnnnnnnnnnnnnnnnnnnnnnnnnnnnnnnnnnnnnnnnnnnnnnnnnnnnnnnnnnnnnnnnnnnnnnnnnnnnnnnnnnnnnnnnnnnnnnnnnnnnnnnnnnnnnnnnnnnnnnnnnnnnnnnnnnnnnnnnnnnnnnnnnnnnnnnnnnnnnnnnnnnnnnnnnnnnnnnnnnnnnnnnnnnnnnnnnnnnnnnnnnnnnnnnnnnnnnnnnnnnnnnnnnnnnnnnnnnnnnnnnnnnnnnnnnnnnnnnnnnnnnnnnnnnnnnnnnnnnnnnnnnnnnnnnnnnnnnnnnnnnnnnnnnnnnnnnnnnnnnnnnnnnnnnnnnnnnnnnnnnnnnnnnnnnnnnnnnnnnnnnnnnnnnnnnnnnnnnnnnnnnnnnnnnnnnnnnnnnnnnnnnnnnnnnnnnnnnnnnnnnnnnnnnnnnnnnnnnnnnnnnnnnnnnnnnnnnnnnnnnnnnnnnnnnnnnnnnnnnnnnnnnnnnnnnnnnnnnnnnnnnnnnnnnnnnnnnnnnnnnnnnnnnnnnnnnnnnnnnnnnnnnnnnnnnnnnnnnnnnnnnnnnnnnnnnnnnnnnnnnnnnnnnnnnnnnnnnnnnnnnnnnnnnnnnnnnnnnnnnnnnnnnnnnnnnnnnnnnnnnnnnnnnnnnnnnnnnnnnnnnnnnnnnnnnnnnnnnnnnnnnnnnnnnnnnnnnnnnnnnnnnnnnnnnnnnnnnnnnnnnnnnnnnnnnnnnnnnnnnnnnnnnnnnnnnnnnnnnnnnnnnnnnnnnnnnnnnnnnnnnnnnnnnnnnnnnnnnnnnnnnnnnnnnnnnnnnnnnnnnnnnnnnnnnnnnnnnnnnnnnnnnnnnnnnnnnnnnnnnnnnnnnnnnnnnnnnnnnnnnnnnnnnnnnnnnnnnnnnnnnnnnnnnnnnnnnnnnnnnnnnnnnnnnnnnnnnnnnnnnnnnnnnnnnnnnnnnnnnnnnnnnnnnnnnnnnnnnnnnnnnnnnnnnnnnnnnnnnnnnnnnnnnnnnnnnnnnnnnnnnnnnnnnnnnnnnnnnnnnnnnnnnnnnnnnnnnnnnnnnnnnnnnnnnnnnnnnnnnnnnnnnnnnnnnnnnnnnnnnnnnnnnnnnnnnnnnnnnnnnnnnnnnnnnnnnnnnnnnnnnnnnnnnnnnnnnnnnnnnnnnnnnnnnnnnnnnnnnnnnnnnnnnnnnnnnnnnnnnnnnnnnnnnnnnnnnnnnnnnnnnnnnnnnnnnnnnnnnnnnnnnnnnnnnnnnnnnnnnnnnnnnnnnnnnnnnnnnnnnnnnnnnnnnnnnnnnnnnnnnnnnnnnnnnnnnnnnnnnnnnnnnnnnnnnnnnnnnnnnnnnnnnnnnnnnnnnnnnnnnnnnnnnnnnnnnnnnnnnnnnnnnnnnnnnnnnnnnnnnnnnnnnnnnnnnnnnnnnnnnnnnnnnnnnnnnnnnnnnnnnnnnnnnnnnnnnnnnnnnnnnnnnnnnnnnnnnnnnnnnnnnnnnnnnnnnnnnnnnnnnnnnnnnnnnnnnnnnnnnnnnnnnnnnnnnnnnnnnnnnnnnnnnnnnnnnnnnnnnnnnnnnnnnnnnnnnnnnnnnnnnnnnnnnnnnnnnnnnnnnnnnnnnnnnnnnnnnnnnnnnnnnnnnnnnnnnnnnnnnnnnnnnnnnnnnnnnnnnnnnnnnnnnnnnnnnnnnnnnnnnnnnnnnnnnnnnnnnnnnnnnnnnnnnnnnnnnnnnnnnnnnnnnnnnnnnnnnnnnnnnnnnnnnnnnnnnnnnnnnnnnnnnnnnnnnnnnnnnnnnnnnnnnnnnnnnnnnnnnnnnnnnnnnnnnnnnnnnnnnnnnnnnnnnnnnnnnnnnnnnnnnnnnnnnnnnnnnnnnnnnnnnnnnnnnnnnnnnnnnnnnnnnnnnnnnnnnnnnnnnnnnnnnnnnnnnnnnnnnnnnnnnnnnnnnnnnnnnnnnnnnnnnnnnnnnnnnnnnnnnnnnnnnnnnnnnnnnnnnnnnnnnnnnnnnnnnnnnnnnnnnnnnnnnnnnnnnnnnnnnnnnnnnnnnnnnnnnnnnnnnnnnnnnnnnnnnnnnnnnnnnnnnnnnnnnnnnnnnnnnnnnnnnnnnnnnnnnnnnnnnnnnnnnnnnnnnnnnnnnnnnnnnnnnnnnnnnnnnnnnnnnnnnnnnnnnnnnnnnnnnnnnnnnnnnnnnnnnnnnnnnnnnnnnnnnnnnnnnnnnnnnnnnnnnnnnnnnnnnnnnnnnnnnnnnnnnnnnnnnnnnnnnnnnnnnnnnnnnnnnnnnnnnnnnnnnnnnnnnnnnnnnnnnnnnnnnnnnnnnnnnnnnnnnnnnnnnnnnnnnnnnnnnnnnnnnnnnnnnnnnnnnnnnnnnnnnnnnnnnnnnnnnnnnnnnnnnnnnnnnnnnnnnnnnnnnnnnnnnnnnnnnnnnnnnnnnnnnnnnnnnnnnnnnnnnnnnnnnnnnnnnnnnnnnnnnnnnnnnnnnnnnnnnnnnnnnnnnnnnnnnnnnnnnnnnnnnnnnnnnnnnnnnnnnnnnnnnnnnnnnnnnnnnnnnnnnnnnnnnnnnnnnnnnnnnnnnnnnnnnnnnnnnnnnnnnnnnnnnnnnnnnnnnnnnnnnnnnnnnnnnnnnnnnnnnnnnnnnnnnnnnnnnnnnnnnnnnnnnnnnnnnnnnnnnnnnnnnnnnnnnnnnnnnnnnnnnnnnnnnnnnnnnnnnnnnnnnnnnnnnnnnnnnnnnnnnnnnnnnnnnnnnnnnnnnnnnnnnnnnnnnnnnnnnnnnnnnnnnnnnnnnnnnnnnnnnnnnnnnnnnnnnnnnnnnnnnnnnnnnnnnnnnnnnnnnnnnnnnnnnnnnnnnnnnnnnnnnnnnnnnnnnnnnnnnnnnnnnnnnnnnnnnnnnnnnnnnnnnnnnnnnnnnnnnnnnnnnnnnnnnnnnnnnnnnnnnnnnnnnnnnnnnnnnnnnnnnnnnnnnnnnnnnnnnnnnnnnnnnnnnnnnnnnnnnnnnnnnnnnnnnnnnnnnnnnnnnnnnnnnnnnnnnnnnnnnnnnnnnnnnnnnnnnnnnnnnnnnnnnnnnnnnnnnnnnnnnnnnnnnnnnnnnnnnnnnnnnnnnnnnnnnnnnnnnnnnnnnnnnnnnnnnnnnnnnnnnnnnnnnnnnnnnnnnnnnnnnnnnnnnnnnnnnnnnnnnnnnnnnnnnnnnnnnnnnnnnnnnnnnnnnnnnnnnnnnnnnnnnnnnnnnnnnnnnnnnnnnnnnnnnnnnnnnnnnnnnnnnnnnnnnnnnnnnnnnnnnnnnnnnnnnnnnnnnnnnnnnnnnnnnnnnnnnnnnnnnnnnnnnnnnnnnnnnnnnnnnnnnnnnnnnnnnnnnnnnnnnnnnnnnnnnnnnnnnnnnnnnnnnnnnnnnnnnnnnnnnnnnnnnnnnnnnnnnnnnnnnnnnnnnnnnnnnnnnnnnnnnnnnnnnnnnnnnnnnnnnnnnnnnnnnnnnnnnnnnnnnnnnnnnnnnnnnnnnnnnnnnnnnnnnnnnnnnnnnnnnnnnnnnnnnnnnnnnnnnnnnnnnnnnnnnnnnnnnnnnnnnnnnnnnnnnnnnnnnnnnnnnnnnnnnnnnnnnnnnnnnnnnnnnnnnnnnnnnnnnnnnnnnnnnnnnnnnnnnnnnnnnnnnnnnnnnnnnnnnnnnnnnnnnnnnnnnnnnnnnnnnnnnnnnnnnnnnnnnnnnnnnnnnnnnnnnnnnnnnnnnnnnnnnnnnnnnnnnnnnnnnnnnnnnnnnnnnnnnnnnnnnnnnnnnnnnnnnnnnnnnnnnnnnnnnnnnnnnnnnnnnnnnnnnnnnnnnnnnnnnnnnnnnnnnnnnnnnnnnnnnnnnnnnnnnnnnnnnnnnnnnnnnnnnnnnnnnnnnnnnnnnnnnnnnnnnnnnnnnnnnnnnnnnnnnnnnnnnnnnnnnnnnnnnnnnnnnnnnnnnnnnnnnnnnnnnnnnnnnnnnnnnnnnnnnnnnnnnnnnnnnnnnnnnnnnnnnnnnnnnnnnnnnnnnnnnnnnnnnnnnnnnnnnnnnnnnnnnnnnnnnnnnnnnnnnnnnnnnnnnnnnnnnnnnnnnnnnnnnnnnnnnnnnnnnnnnnnnnnnnnnnnnnnnnnnnnnnnnnnnnnnnnnnnnnnnnnnnnnnnnnnnnnnnnnnnnnnnnnnnnnnnnnnnnnnnnnnnnnnnnnnnnnnnnnnnnnnnnnnnnnnnnnnnnnnnnnnnnnnnnnnnnnnnnnnnnnnnnnnnnnnnnnnnnnnnnnnnnnnnnnnnnnnnnnnnnnnnnnnnnnnnnnnnnnnnnnnnnnnnnnnnnnnnnnnnnnnnnnnnnnnnnnnnnnnnnnnnnnnnnnnnnnnnnnnnnnnnnnnnnnnnnnnnnnnnnnnnnnnnnnnnnnnnnnnnnnnnnnnnnnnnnnnnnnnnnnnnnnnnnnnnnnnnnnnnnnnnnnnnnnnnnnnnnnnnnnnnnnnnnnnnnnnnnnnnnnnnnnnnnnnnnnnnnnnnnnnnnnnnnnnnnnnnnnnnnnnnnnnnnnnnnnnnnnnnnnnnnnnnnnnnnnnnnnnnnnnnnnnnnnnnnnnnnnnnnnnnnnnnnnnnnnnnnnnnnnnnnnnnnnnnnnnnnnnnnnnnnnnnnnnnnnnnnnnnnnnnnnnnnnnnnnnnnnnnnnnnnnnnnnnnnnnnnnnnnnnnnnnnnnnnnnnnnnnnnnnnnnnnnnnnnnnnnnnnnnnnnnnnnnnnnnnnnnnnnnnnnnnnnnnnnnnnnnnnnnnnnnnnnnnnnnnnnnnnnnnnnnnnnnnnnnnnnnnnnnnnnnnnnnnnnnnnnnnnnnnnnnnnnnnnnnnnnnnnnnnnnnnnnnnnnnnnnnnnnnnnnnnnnnnnnnnnnnnnnnnnnnnnnnnnnnnnnnnnnnnnnnnnnnnnnnnnnnnnnnnnnnnnnnnnnnnnnnnnnnnnnnnnnnnnnnnnnnnnnnnnnnnnnnnnnnnnnnnnnnnnnnnnnnnnnnnnnnnnnnnnnnnnnnnnnnnnnnnnnnnnnnnnnnnnnnnnnnnnnnnnnnnnnnnnnnnnnnnnnnnnnnnnnnnnnnnnnnnnnnnnnnnnnnnnnnnnnnnnnnnnnnnnnnnnnnnnnnnnnnnnnnnnnnnnnnnnnnnnnnnnnnnnnnnnnnnnnnnnnnnnnnnnnnnnnnnnnnnnnnnnnnnnnnnnnnnnnnnnnnnnnnnnnnnnnnnnnnnnnnnnnnnnnnnnnnnnnnnnnnnnnnnnnnnnnnnnnnnnnnnnnnnnnnnnnnnnnnnnnnnnnnnnnnnnnnnnnnnnnnnnnnnnnnnnnnnnnnnnnnnnnnnnnnnnnnnnnnnnnnnnnnnnnnnnnnnnnnnnnnnnnnnnnnnnnnnnnnnnnnnnnnnnnnnnnnnnnnnnnnnnnnnnnnnnnnnnnnnnnnnnnnnnnnnnnnnnnnnnnnnnnnnnnnnnnnnnnnnnnnnnnnnnnnnnnnnnnnnnnnnnnnnnnnnnnnnnnnnnnnnnnnnnnnnnnnnnnnnnnnnnnnnnnnnnnnnnnnnnnnnnnnnnnnnnnnnnnnnnnnnnnnnnnnnnnnnnnnnnnnnnnnnnnnnnnnnnnnnnnnnnnnnnnnnnnnnnnnnnnnnnnnnnnnnnnnnnnnnnnnnnnnnnnnnnnnnnnnnnnnnnnnnnnnnnnnnnnnnnnnnnnnnnnnnnnnnnnnnnnnnnnnnnnnnnnnnnnnnnnnnnnnnnnnnnnnnnnnnnnnnnnnnnnnnnnnnnnnnnnnnnnnnnnnnnnnnnnnnnnnnnnnnnnnnnnnnnnnnnnnnnnnnnnnnnnnnnnnnnnnnnnnnnnnnnnnnnnnnnnnnnnnnnnnnnnnnnnnnnnnnnnnnnnnnnnnnnnnnnnnnnnnnnnnnnnnnnnnnnnnnnnnnnnnnnnnnnnnnnnnnnnnnnnnnnnnnnnnnnnnnnnnnnnnnnnnnnnnnnnnnnnnnnnnnnnnnnnnnnnnnnnnnnnnnnnnnnnnnnnnnnnnnnnnnnnnnnnnnnnnnnnnnnnnnnnnnnnnnnnnnnnnnnnnnnnnnnnnnnnnnnnnnnnnnnnnnnnnnnnnnnnnnnnnnnnnnnnnnnnnnnnnnnnnnnnnnnnnnnnnnnnnnnnnnnnnnnnnnnnnnnnnnnnnnnnnnnnnnnnnnnnnnnnnnnnnnnnnnnnnnnnnnnnnnnnnnnnnnnnnnnnnnnnnnnnnnnnnnnnnnnnnnnnnnnnnnnnnnnnnnnnnnnnnnnnnnnnnnnnnnnnnnnnnnnnnnnnnnnnnnnnnnnnnnnnnnnnnnnnnnnnnnnnnnnnnnnnnnnnnnnnnnnnnnnnnnnnnnnnnnnnnnnnnnnnnnnnnnnnnnnnnnnnnnnnnnnnnnnnnnnnnnnnnnnnnnnnnnnnnnnnnnnnnnnnnnnnnnnnnnnnnnnnnnnnnnnnnnnnnnnnnnnnnnnnnnnnnnnnnnnnnnnnnnnnnnnnnnnnnnnnnnnnnnnnnnnnnnnnnnnnnnnnnnnnnnnnnnnnnnnnnnnnnnnnnnnnnnnnnnnnnnnnnnnnnnnnnnnnnnnnnnnnnnnnnnnnnnnnnnnnnnnnnnnnnnnnnnnnnnnnnnnnnnnnnnnnnnnnnnnnnnnnnnnnnnnnnnnnnnnnnnnnnnnnnnnnnnnnnnnnnnnnnnnnnnnnnnnnnnnnnnnnnnnnnnnnnnnnnnnnnnnnnnnnnnnnnnnnnnnnnnnnnnnnnnnnnnnnnnnnnnnnnnnnnnnnnnnnnnnnnnnnnnnnnnnnnnnnnnnnnnnnnnnnnnnnnnnnnnnnnnnnnnnnnnnnnnnnnnnnnnnnnnnnnnnnnnnnnnnnnnnnnnnnnnnnnnnnnnnnnnnnnnnnnnnnnnnnnnnnnnnnnnnnnnnnnnnnnnnnnnnnnnnnnnnnnnnnnnnnnnnnnnnnnnnnnnnnnnnnnnnnnnnnnnnnnnnnnnnnnnnnnnnnnnnnnnnnnnnnnnnnnnnnnnnnnnnnnnnnnnnnnnnnnnnnnnnnnnnnnnnnnnnnnnnnnnnnnnnnnnnnnnnnnnnnnnnnnnnnnnnnnnnnnnnnnnnnnnnnnnnnnnnnnnnnnnnnnnnnnnnnnnnnnnnnnnnnnnnnnnnnnnnnnnnnnnnnnnnnnnnnnnnnnnnnnnnnnnnnnnnnnnnnnnnnnnnnnnnnnnnnnnnnnnnnnnnnnnnnnnnnnnnnnnnnnnnnnnnnnnnnnnnnnnnnnnnnnnnnnnnnnnnnnnnnnnnnnnnnnnnnnnnnnnnnnnnnnnnnnnnnnnnnnnnnnnnnnnnnnnnnnnnnnnnnnnnnnnnnnnnnnnnnnnnnnnnnnnnnnnnnnnnnnnnnnnnnnnnnnnnnnnnnnnnnnnnnnnnnnnnnnnnnnnnnnnnnnnnnnnnnnnnnnnnnnnnnnnnnnnnnnnnnnnnnnnnnnnnnnnnnnnnnnnnnnnnnnnnnnnnnnnnnnnnnnnnnnnnnnnnnnnnnnnnnnnnnnnnnnnnnnnnnnnnnnnnnnnnnnnnnnnnnnnnnnnnnnnnnnnnnnnnnnnnnnnnnnnnnnnnnnnnnnnnnnnnnnnnnnnnnnnnnnnnnnnnnnnnnnnnnnnnnnnnnnnnnnnnnnnnnnnnnnnnnnnnnnnnnnnnnnnnnnnnnnnnnnnnnnnnnnnnnnnnnnnnnnnnnnnnnnnnnnnnnnnnnnnnnnnnnnnnnnnnnnnnnnnnnnnnnnnnnnnnnnnnnnnnnnnnnnnnnnnnnnnnnnnnnnnnnnnnnnnnnnnnnnnnnnnnnnnnnnnnnnnnnnnnnnnnnnnnnnnnnnnnnnnnnnnnnnnnnnnnnnnnnnnnnnnnnnnnnnnnnnnnnnnnnnnnnnnnnnnnnnnnnnnnnnnnnnnnnnnnnnnnnnnnnnnnnnnnnnnnnnnnnnnnnnnnnnnnnnnnnnnnnnnnnnnnnnnnnnnnnnnnnnnnnnnnnnnnnnnnnnnnnnnnnnnnnnnnnnnnnnnnnnnnnnnnnnnnnnnnnnnnnnnnnnnnnnnnnnnnnnnnnnnnnnnnnnnnnnnnnnnnnnnnnnnnnnnnnnnnnnnnnnnnnnnnnnnnnnnnnnnnnnnnnnnnnnnnnnnnnnnnnnnnnnnnnnnnnnnnnnnnnnnnnnnnnnnnnnnnnnnnnnnnnnnnnnnnnnnnnnnnnnnnnnnnnnnnnnnnnnnnnnnnnnnnnnnnnnnnnnnnnnnnnnnnnnnnnnnnnnnnnnnnnnnnnnnnnnnnnnnnnnnnnnnnnnnnnnnnnnnnnnnnnnnnnnnnnnnnnnnnnnnnnnnnnnnnnnnnnnnnnnnnnnnnnnnnnnnnnnnnnnnnnnnnnnnnnnnnnnnnnnnnnnnnnnnnnnnnnnnnnnnnnnnnnnnnnnnnnnnnnnnnnnnnnnnnnnnnnnnnnnnnnnnnnnnnnnnnnnnnnnnnnnnnnnnnnnnnnnnnnnnnnnnnnnnnnnnnnnnnnnnnnnnnnnnnnnnnnnnnnnnnnnnnnnnnnnnnnnnnnnnnnnnnnnnnnnnnnnnnnnnnnnnnnnnnnnnnnnnnnnnnnnnnnnnnnnnnnnnnnnnnnnnnnnnnnnnnnnnnnnnnnnnnnnnnnnnnnnnnnnnnnnnnnnnnnnnnnnnnnnnnnnnnnnnnnnnnnnnnnnnnnnnnnnnnnnnnnnnnnnnnnnnnnnnnnnnnnnnnnnnnnnnnnnnnnnnnnnnnnnnnnnnnnnnnnnnnnnnnnnnnnnnnnnnnnnnnnnnnnnnnnnnnnnnnnnnnnnnnnnnnnnnnnnnnnnnnnnnnnnnnnnnnnnnnnnnnnnnnnnnnnnnnnnnnnnnnnnnnnnnnnnnnnnnnnnnnnnnnnnnnnnnnnnnnnnnnnnnnnnnnnnnnnnnnnnnnnnnnnnnnnnnnnnnnnnnnnnnnnnnnnnnnnnnnnnnnnnnnnnnnnnnnnnnnnnnnnnnnnnnnnnnnnnnnnnnnnnnnnnnnnnnnnnnnnnnnnnnnnnnnnnnnnnnnnnnnnnnnnnnnnnnnnnnnnnnnnnnnnnnnnnnnnnnnnnnnnnnnnnnnnnnnnnnnnnnnnnnnnnnnnnnnnnnnnnnnnnnnnnnnnnnnnnnnnnnnnnnnnnnnnnnnnnnnnnnnnnnnnnnnnnnnnnnnnnnnnnnnnnnnnnnnnnnnnnnnnnnnnnnnnnnnnnnnnnnnnnnnnnnnnnnnnnnnnnnnnnnnnnnnnnnnnnnnnnnnnnnnnnnnnnnnnnnnnnnnnnnnnnnnnnnnnnnnnnnnnnnnnnnnnnnnnnnnnnnnnnnnnnnnnnnnnnnnnnnnnnnnnnnnnnnnnnnnnnnnnnnnnnnnnnnnnnnnnnnnnnnnnnnnnnnnnnnnnnnnnnnnnnnnnnnnnnnnnnnnnnnnnnnnnnnnnnnnnnnnnnnnnnnnnnnnnnnnnnnnnnnnnnnnnnnnnnnnnnnnnnnnnnnnnnnnnnnnnnnnnnnnnnnnnnnnnnnnnnnnnnnnnnnnnnnnnnnnnnnnnnnnnnnnnnnnnnnnnnnnnnnnnnnnnnnnnnnnnnnnnnnnnnnnnnnnnnnnnnnnnnnnnnnnnnnnnnnnnnnnnnnnnnnnnnnnnnnnnnnnnnnnnnnnnnnnnnnnnnnnnnnnnnnnnnnnnnnnnnnnnnnnnnnnnnnnnnnnnnnnnnnnnnnnnnnnnnnnnnnnnnnnnnnnnnnnnnnnnnnnnnnnnnnnnnnnnnnnnnnnnnnnnnnnnnnnnnnnnnnnnnnnnnnnnnnnnnnnnnnnnnnnnnnnnnnnnnnnnnnnnnnnnnnnnnnnnnnnnnnnnnnnnnnnnnnnnnnnnnnnnnnnnnnnnnnnnnnnnnnnnnnnnnnnnnnnnnnnnnnnnnnnnnnnnnnnnnnnnnnnnnnnnnnnnnnnnnnnnnnnnnnnnnnnnnnnnnnnnnnnnnnnnnnnnnnnnnnnnnnnnnnnnnnnnnnnnnnnnnnnnnnnnnnnnnnnnnnnnnnnnnnnnnnnnnnnnnnnnnnnnnnnnnnnnnnnnnnnnnnnnnnnnnnnnnnnnnnnnnnnnnnnnnnnnnnnnnnnnnnnnnnnnnnnnnnnnnnnnnnnnnnnnnnnnnnnnnnnnnnnnnnnnnnnnnnnnnnnnnnnnnnnnnnnnnnnnnnnnnnnnnnnnnnnnnnnnnnnnnnnnnnnnnnnnnnnnnnnnnnnnnnnnnnnnnnnnnnnnnnnnnnnnnnnnnnnnnnnnnnnnnnnnnnnnnnnnnnnnnnnnnnnnnnnnnnnnnnnnnnnnnnnnnnnnnnnnnnnnnnnnnnnnnnnnnnnnnnnnnnnnnnnnnnnnnnnnnnnnnnnnnnnnnnnnnnnnnnnnnnnnnnnnnnnnnnnnnnnnnnnnnnnnnnnnnnnnnnnnnnnnnnnnnnnnnnnnnnnnnnnnnnnnnnnnnnnnnnnnnnnnnnnnnnnnnnnnnnnnnnnnnnnnnnnnnnnnnnnnnnnnnnnnnnnnnnnnnnnnnnnnnnnnnnnnnnnnnnnnnnnnnnnnnnnnnnnnnnnnnnnnnnnnnnnnnnnnnnnnnnnnnnnnnnnnnnnnnnnnnnnnnnnnnnnnnnnnnnnnnnnnnnnnnnnnnnnnnnnnnnnnnnnnnnnnnnnnnnnnnnnnnnnnnnnnnnnnnnnnnnnnnnnnnnnnnnnnnnnnnnnnnnnnnnnnnnnnnnnnnnnnnnnnnnnnnnnnnnnnnnnnnnnnnnnnnnnnnnnnnnnnnnnnnnnnnnnnnnnnnnnnnnnnnnnnnnnnnnnnnnnnnnnnnnnnnnnnnnnnnnnnnnnnnnnnnnnnnnnnnnnnnnnnnnnnnnnnnnnnnnnnnnnnnnnnnnnnnnnnnnnnnnnnnnnnnnnnnnnnnnnnnnnnnnnnnnnnnnnnnnnnnnnnnnnnnnnnnnnnnnnnnnnnnnnnnnnnnnnnnnnnnnnnnnnnnnnnnnnnnnnnnnnnnnnnnnnnnnnnnnnnnnnnnnnnnnnnnnnnnnnnnnnnnnnnnnnnnnnnnnnnnnnnnnnnnnnnnnnnnnnnnnnnnnnnnnnnnnnnnnnnnnnnnnnnnnnnnnnnnnnnnnnnnnnnnnnnnnnnnnnnnnnnnnnnnnnnnnnnnnnnnnnnnnnnnnnnnnnnnnnnnnnnnnnnnnnnnnnnnnnnnnnnnnnnnnnnnnnnnnnnnnnnnnnnnnnnnnnnnnnnnnnnnnnnnnnnnnnnnnnnnnnnnnnnnnnnnnnnnnnnnnnnnnnnnnnnnnnnnnnnnnnnnnnnnnnnnnnnnnnnnnnnnnnnnnnnnnnnnnnnnnnnnnnnnnnnnnnnnnnnnnnnnnnnnnnnnnnnnnnnnnnnnnnnnnnnnnnnnnnnnnnnnnnnnnnnnnnnnnnnnnnnnnnnnnnnnnnnnnnnnnnnnnnnnnnnnnnnnnnnnnnnnnnnnnnnnnnnnnnnnnnnnnnnnnnnnnnnnnnnnnnnnnnnnnnnnnnnnnnnnnnnnnnnnnnnnnnnnnnnnnnnnnnnnnnnnnnnnnnnnnnnnnnnnnnnnnnnnnnnnnnnnnnnnnnnnnnnnnnnnnnnnnnnnnnnnnnnnnnnnnnnnnnnnnnnnnnnnnnnnnnnnnnnnnnnnnnnnnnnnnnnnnnnnnnnnnnnnnnnnnnnnnnnnnnnnnnnnnnnnnnnnnnnnnnnnnnnnnnnnnnnnnnnnnnnnnnnnnnnnnnnnnnnnnnnnnnnnnnnnnnnnnnnnnnnnnnnnnnnnnnnnnnnnnnnnnnnnnnnnnnnnnnnnnnnnnnnnnnnnnnnnnnnnnnnnnnnnnnnnnnnnnnnnnnnnnnnnnnnnnnnnnnnnnnnnnnnnnnnnnnnnnnnnnnnnnnnnnnnnnnnnnnnnnnnnnnnnnnnnnnnnnnnnnnnnnnnnnnnnnnnnnnnnnnnnnnnnnnnnnnnnnnnnnnnnnnnnnnnnnnnnnnnnnnnnnnnnnnnnnnnnnnnnnnnnnnnnnnnnnnnnnnnnnnnnnnnnnnnnnnnnnnnnnnnnnnnnnnnnnnnnnnnnnnnnnnnnnnnnnnnnnnnnnnnnnnnnnnnnnnnnnnnnnnnnnnnnnnnnnnnnnnnnnnnnnnnnnnnnnnnnnnnnnnnnnnnnnnnnnnnnnnnnnnnnnnnnnnnnnnnnnnnnnnnnnnnnnnnnnnnnnnnnnnnnnnnnnnnnnnnnnnnnnnnnnnnnnnnnnnnnnnnnnnnnnnnnnnnnnnnnnnnnnnnnnnnnnnnnnnnnnnnnnnnnnnnnnnnnnnnnnnnnnnnnnnnnnnnnnnnnnnnnnnnnnnnnnnnnnnnnnnnnnnnnnnnnnnnnnnnnnnnnnnnnnnnnnnnnnnnnnnnnnnnnnnnnnnnnnnnnnnnnnnnnnnnnnnnnnnnnnnnnnnnnnnnnnnnnnnnnnnnnnnnnnnnnnnnnnnnnnnnnnnnnnnnnnnnnnnnnnnnnnnnnnnnnnnnnnnnnnnnnnnnnnnnnnnnnnnnnnnnnnnnnnnnnnnnnnnnnnnnnnnnnnnnnnnnnnnnnnnnnnnnnnnnnnnnnnnnnnnnnnnnnnnnnnnnnnnnnnnnnnnnnnnnnnnnnnnnnnnnnnnnnnnnnnnnnnnnnnnnnnnnnnnnnnnnnnnnnnnnnnnnnnnnnnnnnnnnnnnnnnnnnnnnnnnnnnnnnnnnnnnnnnnnnnnnnnnnnnnnnnnnnnnnnnnnnnnnnnnnnnnnnnnnnnnnnnnnnnnnnnnnnnnnnnnnnnnnnnnnnnnnnnnnnnnnnnnnnnnnnnnnnnnnnnnnnnnnnnnnnnnnnnnnnnnnnnnnnnnnnnnnnnnnnnnnnnnnnnnnnnnnnnnnnnnnnnnnnnnnnnnnnnnnnnnnnnnnnnnnnnnnnnnnnnnnnnnnnnnnnnnnnnnnnnnnnnnnnnnnnnnnnnnnnnnnnnnnnnnnnnnnnnnnnnnnnnnnnnnnnnnnnnnnnnnnnnnnnnnnnnnnnnnnnnnnnnnnnnnnnnnnnnnnnnnnnnnnnnnnnnnnnnnnnnnnnnnnnnnnnnnnnnnnnnnnnnnnnnnnnnnnnnnnnnnnnnnnnnnnnnnnnnnnnnnnnnnnnnnnnnnnnnnnnnnnnnnnnnnnnnnnnnnnnnnnnnnnnnnnnnnnnnnnnnnnnnnnnnnnnnnnnnnnnnnnnnnnnnnnnnnnnnnnnnnnnnnnnnnnnnnnnnnnnnnnnnnnnnnnnnnnnnnnnnnnnnnnnnnnnnnnnnnnnnnnnnnnnnnnnnnnnnnnnnnnnnnnnnnnnnnnnnnnnnnnnnnnnnnnnnnnnnnnnnnnnnnnnnnnnnnnnnnnnnnnnnnnnnnnnnnnnnnnnnnnnnnnnnnnnnnnnnnnnnnnnnnnnnnnnnnnnnnnnnnnnnnnnnnnnnnnnnnnnnnnnnnnnnnnnnnnnnnnnnnnnnnnnnnnnnnnnnnnnnnnnnnnnnnnnnnnnnnnnnnnnnnnnnnnnnnnnnnnnnnnnnnnnnnnnnnnnnnnnnnnnnnnnnnnnnnnnnnnnnnnnnnnnnnnnnnnnnnnnnnnnnnnnnnnnnnnnnnnnnnnnnnnnnnnnnnnnnnnnnnnnnnnnnnnnnnnnnnnnnnnnnnnnnnnnnnnnnnnnnnnnnnnnnnnnnnnnnnnnnnnnnnnnnnnnnnnnnnnnnnnnnnnnnnnnnnnnnnnnnnnnnnnnnnnnnnnnnnnnnnnnnnnnnnnnnnnnnnnnnnnnnnnnnnnnnnnnnnnnnnnnnnnnnnnnnnnnnnnnnnnnnnnnnnnnnnnnnnnnnnnnnnnnnnnnnnnnnnnnnnnnnnnnnnnnnnnnnnnnnnnnnnnnnnnnnnnnnnnnnnnnnnnnnnnnnnnnnnnnnnnnnnnnnnnnnnnnnnnnnnnnnnnnnnnnnnnnnnnnnnnnnnnnnnnnnnnnnnnnnnnnnnnnnnnnnnnnnnnnnnnnnnnnnnnnnnnnnnnnnnnnnnnnnnnnnnnnnnnnnnnnnnnnnnnnnnnnnnnnnnnnnnnnnnnnnnnnnnnnnnnnnnnnnnnnnnnnnnnnnnnnnnnnnnnnnnnnnnnnnnnnnnnnnnnnnnnnnnnnnnnnnnnnnnnnnnnnnnnnnnnnnnnnnnnnnnnnnnnnnnnnnnnnnnnnnnnnnnnnnnnnnnnnnnnnnnnnnnnnnnnnnnnnnnnnnnnnnnnnnnnnnnnnnnnnnnnnnnnnnnnnnnnnnnnnnnnnnnnnnnnnnnnnnnnnnnnnnnnnnnnnnnnnnnnnnnnnnnnnnnnnnnnnnnnnnnnnnnnnnnnnnnnnnnnnnnnnnnnnnnnnnnnnnnnnnnnnnnnnnnnnnnnnnnnnnnnnnnnnnnnnnnnnnnnnnnnnnnnnnnnnnnnnnnnnnnnnnnnnnnnnnnnnnnnnnnnnnnnnnnnnnnnnnnnnnnnnnnnnnnnnnnnnnnnnnnnnnnnnnnnnnnnnnnnnnnnnnnnnnnnnnnnnnnnnnnnnnnnnnnnnnnnnnnnnnnnnnnnnnnnnnnnnnnnnnnnnnnnnnnnnnnnnnnnnnnnnnnnnnnnnnnnnnnnnnnnnnnnnnnnnnnnnnnnnnnnnnnnnnnnnnnnnnnnnnnnnnnnnnnnnnnnnnnnnnnnnnnnnnnnnnnnnnnnnnnnnnnnnnnnnnnnnnnnnnnnnnnnnnnnnnnnnnnnnnnnnnnnnnnnnnnnnnnnnnnnnnnnnnnnnnnnnnnnnnnnnnnnnnnnnnnnnnnnnnnnnnnnnnnnnnnnnnnnnnnnnnnnnnnnnnnnnnnnnnnnnnnnnnnnnnnnnnnnnnnnnnnnnnnnnnnnnnnnnnnnnnnnnnnnnnnnnnnnnnnnnnnnnnnnnnnnnnnnnnnnnnnnnnnnnnnnnnnnnnnnnnnnnnnnnnnnnnnnnnnnnnnnnnnnnnnnnnnnnnnnnnnnnnnnnnnnnnnnnnnnnnnnnnnnnnnnnnnnnnnnnnnnnnnnnnnnnnnnnnnnnnnnnnnnnnnnnnnnnnnnnnnnnnnnnnnnnnnnnnnnnnnnnnnnnnnnnnnnnnnnnnnnnnnnnnnnnnnnnnnnnnnnnnnnnnnnnnnnnnnnnnnnnnnnnnnnnnnnnnnnnnnnnnnnnnnnnnnnnnnnnnnnnnnnnnnnnnnnnnnnnnnnnnnnnnnnnnnnnnnnnnnnnnnnnnnnnnnnnnnnnnnnnnnnnnnnnnnnnnnnnnnnnnnnnnnnnnnnnnnnnnnnnnnnnnnnnnnnnnnnnnnnnnnnnnnnnnnnnnnnnnnnnnnnnnnnnnnnnnnnnnnnnnnnnnnnnnnnnnnnnnnnnnnnnnnnnnnnnnnnnnnnnnnnnnnnnnnnnnnnnnnnnnnnnnnnnnnnnnnnnnnnnnnnnnnnnnnnnnnnnnnnnnnnnnnnnnnnnnnnnnnnnnnnnnnnnnnnnnnnnnnnnnnnnnnnnnnnnnnnnnnnnnnnnnnnnnnnnnnnnnnnnnnnnnnnnnnnnnnnnnnnnnnnnnnnnnnnnnnnnnnnnnnnnnnnnnnnnnnnnnnnnnnnnnnnnnnnnnnnnnnnnnnnnnnnnnnnnnnnnnnnnnnnnnnnnnnnnnnnnnnnnnnnnnnnnnnnnnnnnnnnnnnnnnnnnnnnnnnnnnnnnnnnnnnnnnnnnnnnnnnnnnnnnnnnnnnnnnnnnnnnnnnnnnnnnnnnnnnnnnnnnnnnnnnnnnnnnnnnnnnnnnnnnnnnnnnnnnnnnnnnnnnnnnnnnnnnnnnnnnnnnnnnnnnnnnnnnnnnnnnnnnnnnnnnnnnnnnnnnnnnnnnnnnnnnnnnnnnnnnnnnnnnnnnnnnnnnnnnnnnnnnnnnnnnnnnnnnnnnnnnnnnnnnnnnnnnnnnnnnnnnnnnnnnnnnnnnnnnnnnnnnnnnnnnnnnnnnnnnnnnnnnnnnnnnnnnnnnnnnnnnnnnnnnnnnnnnnnnnnnnnnnnnnnnnnnnnnnnnnnnnnnnnnnnnnnnnnnnnnnnnnnnnnnnnnnnnnnnnnnnnnnnnnnnnnnnnnnnnnnnnnnnnnnnnnnnnnnnnnnnnnnnnnnnnnnnnnnnnnnnnnnnnnnnnnnnnnnnnnnnnnnnnnnnnnnnnnnnnnnnnnnnnnnnnnnnnnnnnnnnnnnnnnnnnnnnnnnnnnnnnnnnnnnnnnnnnnnnnnnnnnnnnnnnnnnnnnnnnnnnnnnnnnnnnnnnnnnnnnnnnnnnnnnnnnnnnnnnnnnnnnnnnnnnnnnnnnnnnnnnnnnnnnnnnnnnnnnnnnnnnnnnnnnnnnnnnnnnnnnnnnnnnnnnnnnnnnnnnnnnnnnnnnnnnnnnnnnnnnnnnnnnnnnnnnnnnnnnnnnnnnnnnnnnnnnnnnnnnnnnnnnnnnnnnnnnnnnnnnnnnnnnnnnnnnnnnnnnnnnnnnnnnnnnnnnnnnnnnnnnnnnnnnnnnnnnnnnnnnnnnnnnnnnnnnnnnnnnnnnnnnnnnnnnnnnnnnnnnnnnnnnnnnnnnnnnnnnnnnnnnnnnnnnnnnnnnnnnnnnnnnnnnnnnnnnnnnnnnnnnnnnnnnnnnnnnnnnnnnnnnnnnnnnnnnnnnnnnnnnnnnnnnnnnnnnnnnnnnnnnnnnnnnnnnnnnnnnnnnnnnnnnnnnnnnnnnnnnnnnnnnnnnnnnnnnnnnnnnnnnnnnnnnnnnnnnnnnnnnnnnnnnnnnnnnnnnnnnnnnnnnnnnnnnnnnnnnnnnnnnnnnnnnnnnnnnnnnnnnnnnnnnnnnnnnnnnnnnnnnnnnnnnnnnnnnnnnnnnnnnnnnnnnnnnnnnnnnnnnnnnnnnnnnnnnnnnnnnnnnnnnnnnnnnnnnnnnnnnnnnnnnnnnnnnnnnnnnnnnnnnnnnnnnnnnnnnnnnnnnnnnnnnnnnnnnnnnnnnnnnnnnnnnnnnnnnnnnnnnnnnnnnnnnnnnnnnnnnnnnnnnnnnnnnnnnnnnnnnnnnnnnnnnnnnnnnnnnnnnnnnnnnnnnnnnnnnnnnnnnnnnnnnnnnnnnnnnnnnnnnnnnnnnnnnnnnnnnnnnnnnnnnnnnnnnnnnnnnnnnnnnnnnnnnnnnnnnnnnnnnnnnnnnnnnnnnnnnnnnnnnnnnnnnnnnnnnnnnnnnnnnnnnnnnnnnnnnnnnnnnnnnnnnnnnnnnnnnnnnnnnnnnnnnnnnnnnnnnnnnnnnnnnnnnnnnnnnnnnnnnnnnnnnnnnnnnnnnnnnnnnnnnnnnnnnnnnnnnnnnnnnnnnnnnnnnnnnnnnnnnnnnnnnnnnnnnnnnnnnnnnnnnnnnnnnnnnnnnnnnnnnnnnnnnnnnnnnnnnnnnnnnnnnnnnnnnnnnnnnnnnnnnnnnnnnnnnnnnnnnnnnnnnnnnnnnnnnnnnnnnnnnnnnnnnnnnnnnnnnnnnnnnnnnnnnnnnnnnnnnnnnnnnnnnnnnnnnnnnnnnnnnnnnnnnnnnnnnnnnnnnnnnnnnnnnnnnnnnnnnnnnnnnnnnnnnnnnnnnnnnnnnnnnnnnnnnnnnnnnnnnnnnnnnnnnnnnnnnnnnnnnnnnnnnnnnnnnnnnnnnnnnnnnnnnnnnnnnnnnnnnnnnnnnnnnnnnnnnnnnnnnnnnnnnnnnnnnnnnnnnnnnnnnnnnnnnnnnnnnnnnnnnnnnnnnnnnnnnnnnnnnnnnnnnnnnnnnnnnnnnnnnnnnnnnnnnnnnnnnnnnnnnnnnnnnnnnnnnnnnnnnnnnnnnnnnnnnnnnnnnnnnnnnnnnnnnnnnnnnnnnnnnnnnnnnnnnnnnnnnnnnnnnnnnnnnnnnnnnnnnnnnnnnnnnnnnnnnnnnnnnnnnnnnnnnnnnnnnnnnnnnnnnnnnnnnnnnnnnnnnnnnnnnnnnnnnnnnnnnnnnnnnnnnnnnnnnnnnnnnnnnnnnnnnnnnnnnnnnnnnnnnnnnnnnnnnnnnnnnnnnnnnnnnnnnnnnnnnnnnnnnnnnnnnnnnnnnnnnnnnnnnnnnnnnnnnnnnnnnnnnnnnnnnnnnnnnnnnnnnnnnnnnnnnnnnnnnnnnnnnnnnnnnnnnnnnnnnnnnnnnnnnnnnnnnnnnnnnnnnnnnnnnnnnnnnnnnnnnnnnnnnnnnnnnnnnnnnnnnnnnnnnnnnnnnnnnnnnnnnnnnnnnnnnnnnnnnnnnnnnnnnnnnnnnnnnnnnnnnnnnnnnnnnnnnnnnnnnnnnnnnnnnnnnnnnnnnnnnnnnnnnnnnnnnnnnnnnnnnnnnnnnnnnnnnnnnnnnnnnnnnnnnnnnnnnnnnnnnnnnnnnnnnnnnnnnnnnnnnnnnnnnnnnnnnnnnnnnnnnnnnnnnnnnnnnnnnnnnnnnnnnnnnnnnnnnnnnnnnnnnnnnnnnnnnnnnnnnnnnnnnnnnnnnnnnnnnnnnnnnnnnnnnnnnnnnnnnnnnnnnnnnnnnnnnnnnnnnnnnnnnnnnnnnnnnnnnnnnnnnnnnnnnnnnnnnnnnnnnnnnnnnnnnnnnnnnnnnnnnnnnnnnnnnnnnnnnnnnnnnnnnnnnnnnnnnnnnnnnnnnnnnnnnnnnnnnnnnnnnnnnnnnnnnnnnnnnnnnnnnnnnnnnnnnnnnnnnnnnnnnnnnnnnnnnnnnnnnnnnnnnnnnnnnnnnnnnnnnnnnnnnnnnnnnnnnnnnnnnnnnnnnnnnnnnnnnnnnnnnnnnnnnnnnnnnnnnnnnnnnnnnnnnnnnnnnnnnnnnnnnnnnnnnnnnnnnnnnnnnnnnnnnnnnnnnnnnnnnnnnnnnnnnnnnnnnnnnnnnnnnnnnnnnnnnnnnnnnnnnnnnnnnnnnnnnnnnnnnnnnnnnnnnnnnnnnnnnnnnnnnnnnnnnnnnnnnnnnnnnnnnnnnnnnnnnnnnnnnnnnnnnnnnnnnnnnnnnnnnnnnnnnnnnnnnnnnnnnnnnnnnnnnnnnnnnnnnnnnnnnnnnnnnnnnnnnnnnnnnnnnnnnnnnnnnnnnnnnnnnnnnnnnnnnnnnnnnnnnnnnnnnnnnnnnnnnnnnnnnnnnnnnnnnnnnnnnnnnnnnnnnnnnnnnnnnnnnnnnnnnnnnnnnnnnnnnnnnnnnnnnnnnnnnnnnnnnnnnnnnnnnnnnnnnnnnnnnnnnnnnnnnnnnnnnnnnnnnnnnnnnnnnnnnnnnnnnnnnnnnnnnnnnnnnnnnnnnnnnnnnnnnnnnnnnnnnnnnnnnnnnnnnnnnnnnnnnnnnnnnnnnnnnnnnnnnnnnnnnnnnnnnnnnnnnnnnnnnnnnnnnnnnnnnnnnnnnnnnnnnnnnnnnnnnnnnnnnnnnnnnnnnnnnnnnnnnnnnnnnnnnnnnnnnnnnnnnnnnnnnnnnnnnnnnnnnnnnnnnnnnnnnnnnnnnnnnnnnnnnnnnnnnnnnnnnnnnnnnnnnnnnnnnnnnnnnnnnnnnnnnnnnnnnnnnnnnnnnnnnnnnnnnnnnnnnnnnnnnnnnnnnnnnnnnnnnnnnnnnnnnnnnnnnnnnnnnnnnnnnnnnnnnnnnnnnnnnnnnnnnnnnnnnnnnnnnnnnnnnnnnnnnnnnnnnnnnnnnnnnnnnnnnnnnnnnnnnnnnnnnnnnnnnnnnnnnnnnnnnnnnnnnnnnnnnnnnnnnnnnnnnnnnnnnnnnnnnnnnnnnnnnnnnnnnnnnnnnnnnnnnnnnnnnnnnnnnnnnnnnnnnnnnnnnnnnnnnnnnnnnnnnnnnnnnnnnnnnnnnnnnnnnnnnnnnnnnnnnnnnnnnnnnnnnnnnnnnnnnnnnnnnnnnnnnnnnnnnnnnnnnnnnnnnnnnnnnnnnnnnnnnnnnnnnnnnnnnnnnnnnnnnnnnnnnnnnnnnnnnnnnnnnnnnnnnnnnnnnnnnnnnnnnnnnnnnnnnnnnnnnnnnnnnnnnnnnnnnnnnnnnnnnnnnnnnnnnnnnnnnnnnnnnnnnnnnnnnnnnnnnnnnnnnnnnnnnnnnnnnnnnnnnnnnnnnnnnnnnnnnnnnnnnnnnnnnnnnnnnnnnnnnnnnnnnnnnnnnnnnnnnnnnnnnnnnnnnnnnnnnnnnnnnnnnnnnnnnnnnnnnnnnnnnnnnnnnnnnnnnnnnnnnnnnnnnnnnnnnnnnnnnnnnnnnnnnnnnnnnnnnnnnnnnnnnnnnnnnnnnnnnnnnnnnnnnnnnnnnnnnnnnnnnnnnnnnnnnnnnnnnnnnnnnnnnnnnnnnnnnnnnnnnnnnnnnnnnnnnnnnnnnnnnnnnnnnnnnnnnnnnnnnnnnnnnnnnnnnnnnnnnnnnnnnnnnnnnnnnnnnnnnnnnnnnnnnnnnnnnnnnnnnnnnnnnnnnnnnnnnnnnnnnnnnnnnnnnnnnnnnnnnnnnnnnnnnnnnnnnnnnnnnnnnnnnnnnnnnnnnnnnnnnnnnnnnnnnnnnnnnnnnnnnnnnnnnnnnnnnnnnnnnnnnnnnnnnnnnnnnnnnnnnnnnnnnnnnnnnnnnnnnnnnnnnnnnnnnnnnnnnnnnnnnnnnnnnnnnnnnnnnnnnnnnnnnnnnnnnnnnnnnnnnnnnnnnnnnnnnnnnnnnnnnnnnnnnnnnnnnnnnnnnnnnnnnnnnnnnnnnnnnnnnnnnnnnnnnnnnnnnnnnnnnnnnnnnnnnnnnnnnnnnnnnnnnnnnnnnnnnnnnnnnnnnnnnnnnnnnnnnnnnnnnnnnnnnnnnnnnnnnnnnnnnnnnnnnnnnnnnnnnnnnnnnnnnnnnnnnnnnnnnnnnnnnnnnnnnnnnnnnnnnnnnnnnnnnnnnnnnnnnnnnnnnnnnnnnnnnnnnnnnnnnnnnnnnnnnnnnnnnnnnnnnnnnnnnnnnnnnnnnnnnnnnnnnnnnnnnnnnnnnnnnnnnnnnnnnnnnnnnnnnnnnnnnnnnnnnnnnnnnnnnnnnnnnnnnnnnnnnnnnnnnnnnnnnnnnnnnnnnnnnnnnnnnnnnnnnnnnnnnnnnnnnnnnnnnnnnnnnnnnnnnnnnnnnnnnnnnnnnnnnnnnnnnnnnnnnnnnnnnnnnnnnnnnnnnnnnnnnnnnnnnnnnnnnnnnnnnnnnnnnnnnnnnnnnnnnnnnnnnnnnnnnnnnnnnnnnnnnnnnnnnnnnnnnnnnnnnnnnnnnnnnnnnnnnnnnnnnnnnnnnnnnnnnnnnnnnnnnnnnnnnnnnnnnnnnnnnnnnnnnnnnnnnnnnnnnnnnnnnnnnnnnnnnnnnnnnnnnnnnnnnnnnnnnnnnnnnnnnnnnnnnnnnnnnnnnnnnnnnnnnnnnnnnnnnnnnnnnnnnnnnnnnnnnnnnnnnnnnnnnnnnnnnnnnnnnnnnnnnnnnnnnnnnnnnnnnnnnnnnnnnnnnnnnnnnnnnnnnnnnnnnnnnnnnnnnnnnnnnnnnnnnnnnnnnnnnnnnnnnnnnnnnnnnnnnnnnnnnnnnnnnnnnnnnnnnnnnnnnnnnnnnnnnnnnnnnnnnnnnnnnnnnnnnnnnnnnnnnnnnnnnnnnnnnnnnnnnnnnnnnnnnnnnnnnnnnnnnnnnnnnnnnnnnnnnnnnnnnnnnnnnnnnnnnnnnnnnnnnnnnnnnnnnnnnnnnnnnnnnnnnnnnnnnnnnnnnnnnnnnnnnnnnnnnnnnnnnnnnnnnnnnnnnnnnnnnnnnnnnnnnnnnnnnnnnnnnnnnnnnnnnnnnnnnnnnnnnnnnnnnnnnnnnnnnnnnnnnnnnnnnnnnnnnnnnnnnnnnnnnnnnnnnnnnnnnnnnnnnnnnnnnnnnnnnnnnnnnnnnnnnnnnnnnnnnnnnnnnnnnnnnnnnnnnnnnnnnnnnnnnnnnnnnnnnnnnnnnnnnnnnnnnnnnnnnnnnnnnnnnnnnnnnnnnnnnnnnnnnnnnnnnnnnnnnnnnnnnnnnnnnnnnnnnnnnnnnnnnnnnnnnnnnnnnnnnnnnnnnnnnnnnnnnnnnnnnnnnnnnnnnnnnnnnnnnnnnnnnnnnnnnnnnnnnnnnnnnnnnnnnnnnnnnnnnnnnnnnnnnnnnnnnnnnnnnnnnnnnnnnnnnnnnnnnnnnnnnnnnnnnnnnnnnnnnnnnnnnnnnnnnnnnnnnnnnnnnnnnnnnnnnnnnnnnnnnnnnnnnnnnnnnnnnnnnnnnnnnnnnnnnnnnnnnnnnnnnnnnnnnnnnnnnnnnnnnnnnnnnnnnnnnnnnnnnnnnnnnnnnnnnnnnnnnnnnnnnnnnnnnnnnnnnnnnnnnnnnnnnnnnnnnnnnnnnnnnnnnnnnnnnnnnnnnnnnnnnnnnnnnnnnnnnnnnnnnnnnnnnnnnnnnnnnnnnnnnnnnnnnnnnnnnnnnnnnnnnnnnnnnnnnnnnnnnnnnnnnnnnnnnnnnnnnnnnnnnnnnnnnnnnnnnnnnnnnnnnnnnnnnnnnnnnnnnnnnnnnnnnnnnnnnnnnnnnnnnnnnnnnnnnnnnnnnnnnnnnnnnnnnnnnnnnnnnnnnnnnnnnnnnnnnnnnnnnnnnnnnnnnnnnnnnnnnnnnnnnnnnnnnnnnnnnnnnnnnnnnnnnnnnnnnnnnnnnnnnnnnnnnnnnnnnnnnnnnnnnnnnnnnnnnnnnnnnnnnnnnnnnnnnnnnnnnnnnnnnnnnnnnnnnnnnnnnnnnnnnnnnnnnnnnnnnnnnnnnnnnnnnnnnnnnnnnnnnnnnnnnnnnnnnnnnnnnnnnnnnnnnnnnnnnnnnnnnnnnnnnnnnnnnnnnnnnnnnnnnnnnnnnnnnnnnnnnnnnnnnnnnnnnnnnnnnnnnnnnnnnnnnnnnnnnnnnnnnnnnnnnnnnnnnnnnnnnnnnnnnnnnnnnnnnnnnnnnnnnnnnnnnnnnnnnnnnnnnnnnnnnnnnnnnnnnnnnnnnnnnnnnnnnnnnnnnnnnnnnnnnnnnnnnnnnnnnnnnnnnnnnnnnnnnnnnnnnnnnnnnnnnnnnnnnnnnnnnnnnnnnnnnnnnnnnnnnnnnnnnnnnnnnnnnnnnnnnnnnnnnnnnnnnnnnnnnnnnnnnnnnnnnnnnnnnnnnnnnnnnnnnnnnnnnnnnnnnnnnnnnnnnnnnnnnnnnnnnnnnnnnnnnnnnnnnnnnnnnnnnnnnnnnnnnnnnnnnnnnnnnnnnnnnnnnnnnnnnnnnnnnnnnnnnnnnnnnnnnnnnnnnnnnnnnnnnnnnnnnnnnnnnnnnnnnnnnnnnnnnnnnnnnnnnnnnnnnnnnnnnnnnnnnnnnnnnnnnnnnnnnnnnnnnnnnnnnnnnnnnnnnnnnnnnnnnnnnnnnnnnnnnnnnnnnnnnnnnnnnnnnnnnnnnnnnnnnnnnnnnnnnnnnnnnnnnnnnnnnnnnnnnnnnnnnnnnnnnnnnnnnnnnnnnnnnnnnnnnnnnnnnnnnnnnnnnnnnnnnnnnnnnnnnnnnnnnnnnnnnnnnnnnnnnnnnnnnnnnnnnnnnnnnnnnnnnnnnnnnnnnnnnnnnnnnnnnnnnnnnnnnnnnnnnnnnnnnnnnnnnnnnnnnnnnnnnnnnnnnnnnnnnnnnnnnnnnnnnnnnnnnnnnnnnnnnnnnnnnnnnnnnnnnnnnnnnnnnnnnnnnnnnnnnnnnnnnnnnnnnnnnnnnnnnnnnnnnnnnnnnnnnnnnnnnnnnnnnnnnnnnnnnnnnnnnnnnnnnnnnnnnnnnnnnnnnnnnnnnnnnnnnnnnnnnnnnnnnnnnnnnnnnnnnnnnnnnnnnnnnnnnnnnnnnnnnnnnnnnnnnnnnnnnnnnnnnnnnnnnnnnnnnnnnnnnnnnnnnnnnnnnnnnnnnnnnnnnnnnnnnnnnnnnnnnnnnnnnnnnnnnnnnnnnnnnnnnnnnnnnnnnnnnnnnnnnnnnnnnnnnnnnnnnnnnnnnnnnnnnnnnnnnnnnnnnnnnnnnnnnnnnnnnnnnnnnnnnnnnnnnnnnnnnnnnnnnnnnnnnnnnnnnnnnnnnnnnnnnnnnnnnnnnnnnnnnnnnnnnnnnnnnnnnnnnnnnnnnnnnnnnnnnnnnnnnnnnnnnnnnnnnnnnnnnnnnnnnnnnnnnnnnnnnnnnnnnnnnnnnnnnnnnnnnnnnnnnnnnnnnnnnnnnnnnnnnnnnnnnnnnnnnnnnnnnnnnnnnnnnnnnnnnnnnnnnnnnnnnnnnnnnnnnnnnnnnnnnnnnnnnnnnnnnnnnnnnnnnnnnnnnnnnnnnnnnnnnnnnnnnnnnnnnnnnnnnnnnnnnnnnnnnnnnnnnnnnnnnnnnnnnnnnnnnnnnnnnnnnnnnnnnnnnnnnnnnnnnnnnnnnnnnnnnnnnnnnnnnnnnnnnnnnnnnnnnnnnnnnnnnnnnnnnnnnnnnnnnnnnnnnnnnnnnnnnnnnnnnnnnnnnnnnnnnnnnnnnnnnnnnnnnnnnnnnnnnnnnnnnnnnnnnnnnnnnnnnnnnnnnnnnnnnnnnnnnnnnnnnnnnnnnnnnnnnnnnnnnnnnnnnnnnnnnnnnnnnnnnnnnnnnnnnnnnnnnnnnnnnnnnnnnnnnnnnnnnnnnnnnnnnnnnnnnnnnnnnnnnnnnnnnnnnnnnnnnnnnnnnnnnnnnnnnnnnnnnnnnnnnnnnnnnnnnnnnnnnnnnnnnnnnnnnnnnnnnnnnnnnnnnnnnnnnnnnnnnnnnnnnnnnnnnnnnnnnnnnnnnnnnnnnnnnnnnnnnnnnnnnnnnnnnnnnnnnnnnnnnnnnnnnnnnnnnnnnnnnnnnnnnnnnnnnnnnnnnnnnnnnnnnnnnnnnnnnnnnnnnnnnnnnnnnnnnnnnnnnnnnnnnnnnnnnnnnnnnnnnnnnnnnnnnnnnnnnnnnnnnnnnnnnnnnnnnnnnnnnnnnnnnnnnnnnnnnnnnnnnnnnnnnnnnnnnnnnnnnnnnnnnnnnnnnnnnnnnnnnnnnnnnnnnnnnnnnnnnnnnnnnnnnnnnnnnnnnnnnnnnnnnnnnnnnnnnnnnnnnnnnnnnnnnnnnnnnnnnnnnnnnnnnnnnnnnnnnnnnnnnnnnnnnnnnnnnnnnnnnnnnnnnnnnnnnnnnnnnnnnnnnnnnnnnnnnnnnnnnnnnnnnnnnnnnnnnnnnnnnnnnnnnnnnnnnnnnnnnnnnnnnnnnnnnnnnnnnnnnnnnnnnnnnnnnnnnnnnnnnnnnnnnnnnnnnnnnnnnnnnnnnnnnnnnnnnnnnnnnnnnnnnnnnnnnnnnnnnnnnnnnnnnnnnnnnnnnnnnnnnnnnnnnnnnnnnnnnnnnnnnnnnnnnnnnnnnnnnnnnnnnnnnnnnnnnnnnnnnnnnnnnnnnnnnnnnnnnnnnnnnnnnnnnnnnnnnnnnnnnnnnnnnnnnnnnnnnnnnnnnnnnnnnnnnnnnnnnnnnnnnnnnnnnnnnnnnnnnnnnnnnnnnnnnnnnnnnnnnnnnnnnnnnnnnnnnnnnnnnnnnnnnnnnnnnnnnnnnnnnnnnnnnnnnnnnnnnnnnnnnnnnnnnnnnnnnnnnnnnnnnnnnnnnnnnnnnnnnnnnnnnnnnnnnnnnnnnnnnnnnnnnnnnnnnnnnnnnnnnnnnnnnnnnnnnnnnnnnnnnnnnnnnnnnnnnnnnnnnnnnnnnnnnnnnnnnnnnnnnnnnnnnnnnnnnnnnnnnnnnnnnnnnnnnnnnnnnnnnnnnnnnnnnnnnnnnnnnnnnnnnnnnnnnnnnnnnnnnnnnnnnnnnnnnnnnnnnnnnnnnnnnnnnnnnnnnnnnnnnnnnnnnnnnnnnnnnnnnnnnnnnnnnnnnnnnnnnnnnnnnnnnnnnnnnnnnnnnnnnnnnnnnnnnnnnnnnnnnnnnnnnnnnnnnnnnnnnnnnnnnnnnnnnnnnnnnnnnnnnnnnnnnnnnnnnnnnnnnnnnnnnnnnnnnnnnnnnnnnnnnnnnnnnnnnnnnnnnnnnnnnnnnnnnnnnnnnnnnnnnnnnnnnnnnnnnnnnnnnnnnnnnnnnnnnnnnnnnnnnnnnnnnnnnnnnnnnnnnnnnnnnnnnnnnnnnnnnnnnnnnnnnnnnnnnnnnnnnnnnnnnnnnnnnnnnnnnnnnnnnnnnnnnnnnnnnnnnnnnnnnnnnnnnnnnnnnnnnnnnnnnnnnnnnnnnnnnnnnnnnnnnnnnnnnnnnnnnnnnnnnnnnnnnnnnnnnnnnnnnnnnnnnnnnnnnnnnnnnnnnnnnnnnnnnnnnnnnnnnnnnnnnnnnnnnnnnnnnnnnnnnnnnnnnnnnnnnnnnnnnnnnnnnnnnnnnnnnnnnnnnnnnnnnnnnnnnnnnnnnnnnnnnnnnnnnnnnnnnnnnnnnnnnnnnnnnnnnnnnnnnnnnnnnnnnnnnnnnnnnnnnnnnnnnnnnnnnnnnnnnnnnnnnnnnnnnnnnnnnnnnnnnnnnnnnnnnnnnnnnnnnnnnnnnnnnnnnnnnnnnnnnnnnnnnnnnnnnnnnnnnnnnnnnnnnnnnnnnnnnnnnnnnnnnnnnnnnnnnnnnnnnnnnnnnnnnnnnnnnnnnnnnnnnnnnnnnnnnnnnnnnnnnnnnnnnnnnnnnnnnnnnnnnnnnnnnnnnnnnnnnnnnnnnnnnnnnnnnnnnnnnnnnnnnnnnnnnnnnnnnnnnnnnnnnnnnnnnnnnnnnnnnnnnnnnnnnnnnnnnnnnnnnnnnnnnnnnnnnnnnnnnnnnnnnnnnnnnnnnnnnnnnnnnnnnnnnnnnnnnnnnnnnnnnnnnnnnnnnnnnnnnnnnnnnnnnnnnnnnnnnnnnnnnnnnnnnnnnnnnnnnnnnnnnnnnnnnnnnnnnnnnnnnnnnnnnnnnnnnnnnnnnnnnnnnnnnnnnnnnnnnnnnnnnnnnnnnnnnnnnnnnnnnnnnnnnnnnnnnnnnnnnnnnnnnnnnnnnnnnnnnnnnnnnnnnnnnnnnnnnnnnnnnnnnnnnnnnnnnnnnnnnnnnnnnnnnnnnnnnnnnnnnnnnnnnnnnnnnnnnnnnnnnnnnnnnnnnnnnnnnnnnnnnnnnnnnnnnnnnnnnnnnnnnnnnnnnnnnnnnnnnnnnnnnnnnnnnnnnnnnnnnnnnnnnnnnnnnnnnnnnnnnnnnnnnnnnnnnnnnnnnnnnnnnnnnnnnnnnnnnnnnnnnnnnnnnnnnnnnnnnnnnnnnnnnnnnnnnnnnnnnnnnnnnnnnnnnnnnnnnnnnnnnnnnnnnnnnnnnnnnnnnnnnnnnnnnnnnnnnnnnnnnnnnnnnnnnnnnnnnnnnnnnnnnnnnnnnnnnnnnnnnnnnnnnnnnnnnnnnnnnnnnnnnnnnnnnnnnnnnnnnnnnnnnnnnnnnnnnnnnnnnnnnnnnnnnnnnnnnnnnnnnnnnnnnnnnnnnnnnnnnnnnnnnnnnnnnnnnnnnnnnnnnnnnnnnnnnnnnnnnnnnnnnnnnnnnnnnnnnnnnnnnnnnnnnnnnnnnnnnnnnnnnnnnnnnnnnnnnnnnnnnnnnnnnnnnnnnnnnnnnnnnnnnnnnnnnnnnnnnnnnnnnnnnnnnnnnnnnnnnnnnnnnnnnnnnnnnnnnnnnnnnnnnnnnnnnnnnnnnnnnnnnnnnnnnnnnnnnnnnnnnnnnnnnnnnnnnnnnnnnnnnnnnnnnnnnnnnnnnnnnnnnnnnnnnnnnnnnnnnnnnnnnnnnnnnnnnnnnnnnnnnnnnnnnnnnnnnnnnnnnnnnnnnnnnnnnnnnnnnnnnnnnnnnnnnnnnnnnnnnnnnnnnnnnnnnnnnnnnnnnnnnnnnnnnnnnnnnnnnnnnnnnnnnnnnnnnnnnnnnnnnnnnnnnnnnnnnnnnnnnnnnnnnnnnnnnnnnnnnnnnnnnnnnnnnnnnnnnnnnnnnnnnnnnnnnnnnnnnnnnnnnnnnnnnnnnnnnnnnnnnnnnnnnnnnnnnnnnnnnnnnnnnnnnnnnnnnnnnnnnnnnnnnnnnnnnnnnnnnnnnnnnnnnnnnnnnnnnnnnnnnnnnnnnnnnnnnnnnnnnnnnnnnnnnnnnnnnnnnnnnnnnnnnnnnnnnnnnnnnnnnnnnnnnnnnnnnnnnnnnnnnnnnnnnnnnnnnnnnnnnnnnnnnnnnnnnnnnnnnnnnnnnnnnnnnnnnnnnnnnnnnnnnnnnnnnnnnnnnnnnnnnnnnnnnnnnnnnnnnnnnnnnnnnnnnnnnnnnnnnnnnnnnnnnnnnnnnnnnnnnnnnnnnnnnnnnnnnnnnnnnnnnnnnnnnnnnnnnnnnnnnnnnnnnnnnnnnnnnnnnnnnnnnnnnnnnnnnnnnnnnnnnnnnnnnnnnnnnnnnnnnnnnnnnnnnnnnnnnnnnnnnnnnnnnnnnnnnnnnnnnnnnnnnnnnnnnnnnnnnnnnnnnnnnnnnnnnnnnnnnnnnnnnnnnnnnnnnnnnnnnnnnnnnnnnnnnnnnnnnnnnnnnnnnnnnnnnnnnnnnnnnnnnnnnnnnnnnnnnnnnnnnnnnnnnnnnnnnnnnnnnnnnnnnnnnnnnnnnnnnnnnnnnnnnnnnnnnnnnnnnnnnnnnnnnnnnnnnnnnnnnnnnnnnnnnnnnnnnnnnnnnnnnnnnnnnnnnnnnnnnnnnnnnnnnnnnnnnnnnnnnnnnnnnnnnnnnnnnnnnnnnnnnnnnnnnnnnnnnnnnnnnnnnnnnnnnnnnnnnnnnnnnnnnnnnnnnnnnnnnnnnnnnnnnnnnnnnnnnnnnnnnnnnnnnnnnnnnnnnnnnnnnnnnnnnnnnnnnnnnnnnnnnnnnnnnnnnnnnnnnnnnnnnnnnnnnnnnnnnnnnnnnnnnnnnnnnnnnnnnnnnnnnnnnnnnnnnnnnnnnnnnnnnnnnnnnnnnnnnnnnnnnnnnnnnnnnnnnnnnnnnnnnnnnnnnnnnnnnnnnnnnnnnnnnnnnnnnnnnnnnnnnnnnnnnnnnnnnnnnnnnnnnnnnnnnnnnnnnnnnnnnnnnnnnnnnnnnnnnnnnnnnnnnnnnnnnnnnnnnnnnnnnnnnnnnnnnnnnnnnnnnnnnnnnnnnnnnnnnnnnnnnnnnnnnnnnnnnnnnnnnnnnnnnnnnnnnnnnnnnnnnnnnnnnnnnnnnnnnnnnnnnnnnnnnnnnnnnnnnnnnnnnnnnnnnnnnnnnnnnnnnnnnnnnnnnnnnnnnnnnnnnnnnnnnnnnnnnnnnnnnnnnnnnnnnnnnnnnnnnnnnnnnnnnnnnnnnnnnnnnnnnnnnnnnnnnnnnnnnnnnnnnnnnnnnnnnnnnnnnnnnnnnnnnnnnnnnnnnnnnnnnnnnnnnnnnnnnnnnnnnnnnnnnnnnnnnnnnnnnnnnnnnnnnnnnnnnnnnnnnnnnnnnnnnnnnnnnnnnnnnnnnnnnnnnnnnnnnnnnnnnnnnnnnnnnnnnnnnnnnnnnnnnnnnnnnnnnnnnnnnnnnnnnnnnnnnnnnnnnnnnnnnnnnnnnnnnnnnnnnnnnnnnnnnnnnnnnnnnnnnnnnnnnnnnnnnnnnnnnnnnnnnnnnnnnnnnnnnnnnnnnnnnnnnnnnnnnnnnnnnnnnnnnnnnnnnnnnnnnnnnnnnnnnnnnnnnnnnnnnnnnnnnnnnnnnnnnnnnnnnnnnnnnnnnnnnnnnnnnnnnnnnnnnnnnnnnnnnnnnnnnnnnnnnnnnnnnnnnnnnnnnnnnnnnnnnnnnnnnnnnnnnnnnnnnnnnnnnnnnnnnnnnnnnnnnnnnnnnnnnnnnnnnnnnnnnnnnnnnnnnnnnnnnnnnnnnnnnnnnnnnnnnnnnnnnnnnnnnnnnnnnnnnnnnnnnnnnnnnnnnnnnnnnnnnnnnnnnnnnnnnnnnnnnnnnnnnnnnnnnnnnnnnnnnnnnnnnnnnnnnnnnnnnnnnnnnnnnnnnnnnnnnnnnnnnnnnnnnnnnnnnnnnnnnnnnnnnnnnnnnnnnnnnnnnnnnnnnnnnnnnnnnnnnnnnnnnnnnnnnnnnnnnnnnnnnnnnnnnnnnnnnnnnnnnnnnnnnnnnnnnnnnnnnnnnnnnnnnnnnnnnnnnnnnnnnnnnnnnnnnnnnnnnnnnnnnnnnnnnnnnnnnnnnnnnnnnnnnnnnnnnnnnnnnnnnnnnnnnnnnnnnnnnnnnnnnnnnnnnnnnnnnnnnnnnnnnnnnnnnnnnnnnnnnnnnnnnnnnnnnnnnnnnnnnnnnnnnnnnnnnnnnnnnnnnnnnnnnnnnnnnnnnnnnnnnnnnnnnnnnnnnnnnnnnnnnnnnnnnnnnnnnnnnnnnnnnnnnnnnnnnnnnnnnnnnnnnnnnnnnnnnnnnnnnnnnnnnnnnnnnnnnnnnnnnnnnnnnnnnnnnnnnnnnnnnnnnnnnnnnnnnnnnnnnnnnnnnnnnnnnnnnnnnnnnnnnnnnnnnnnnnnnnnnnnnnnnnnnnnnnnnnnnnnnnnnnnnnnnnnnnnnnnnnnnnnnnnnnnnnnnnnnnnnnnnnnnnnnnnnnnnnnnnnnnnnnnnnnnnnnnnnnnnnnnnnnnnnnnnnnnnnnnnnnnnnnnnnnnnnnnnnnnnnnnnnnnnnnnnnnnnnnnnnnnnnnnnnnnnnnnnnnnnnnnnnnnnnnnnnnnnnnnnnnnnnnnnnnnnnnnnnnnnnnnnnnnnnnnnnnnnnnnnnnnnnnnnnnnnnnnnnnnnnnnnnnnnnnnnnnnnnnnnnnnnnnnnnnnnnnnnnnnnnnnnnnnnnnnnnnnnnnnnnnnnnnnnnnnnnnnnnnnnnnnnnnnnnnnnnnnnnnnnnnnnnnnnnnnnnnnnnnnnnnnnnnnnnnnnnnnnnnnnnnnnnnnnnnnnnnnnnnnnnnnnnnnnnnnnnnnnnnnnnnnnnnnnnnnnnnnnnnnnnnnnnnnnnnnnnnnnnnnnnnnnnnnnnnnnnnnnnnnnnnnnnnnnnnnnnnnnnnnnnnnnnnnnnnnnnnnnnnnnnnnnnnnnnnnnnnnnnnnnnnnnnnnnnnnnnnnnnnnnnnnnnnnnnnnnnnnnnnnnnnnnnnnnnnnnnnnnnnnnnnnnnnnnnnnnnnnnnnnnnnnnnnnnnnnnnnnnnnnnnnnnnnnnnnnnnnnnnnnnnnnnnnnnnnnnnnnnnnnnnnnnnnnnnnnnnnnnnnnnnnnnnnnnnnnnnnnnnnnnnnnnnnnnnnnnnnnnnnnnnnnnnnnnnnnnnnnnnnnnnnnnnnnnnnnnnnnnnnnnnnnnnnnnnnnnnnnnnnnnnnnnnnnnnnnnnnnnnnnnnnnnnnnnnnnnnnnnnnnnnnnnnnnnnnnnnnnnnnnnnnnnnnnnnnnnnnnnnnnnnnnnnnnnnnnnnnnnnnnnnnnnnnnnnnnnnnnnnnnnnnnnnnnnnnnnnnnnnnnnnnnnnnnnnnnnnnnnnnnnnnnnnnnnnnnnnnnnnnnnnnnnnnnnnnnnnnnnnnnnnnnnnnnnnnnnnnnnnnnnnnnnnnnnnnnnnnnnnnnnnnnnnnnnnnnnnnnnnnnnnnnnnnnnnnnnnnnnnnnnnnnnnnnnnnnnnnnnnnnnnnnnnnnnnnnnnnnnnnnnnnnnnnnnnnnnnnnnnnnnnnnnnnnnnnnnnnnnnnnnnnnnnnnnnnnnnnnnnnnnnnnnnnnnnnnnnnnnnnnnnnnnnnnnnnnnnnnnnnnnnnnnnnnnnnnnnnnnnnnnnnnnnnnnnnnnnnnnnnnnnnnnnnnnnnnnnnnnnnnnnnnnnnnnnnnnnnnnnnnnnnnnnnnnnnnnnnnnnnnnnnnnnnnnnnnnnnnnnnnnnnnnnnnnnnnnnnnnnnnnnnnnnnnnnnnnnnnnnnnnnnnnnnnnnnnnnnnnnnnnnnnnnnnnnnnnnnnnnnnnnnnnnnnnnnnnnnnnnnnnnnnnnnnnnnnnnnnnnnnnnnnnnnnnnnnnnnnnnnnnnnnnnnnnnnnnnnnnnnnnnnnnnnnnnnnnnnnnnnnnnnnnnnnnnnnnnnnnnnnnnnnnnnnnnnnnnnnnnnnnnnnnnnnnnnnnnnnnnnnnnnnnnnnnnnnnnnnnnnnnnnnnnnnnnnnnnnnnnnnnnnnnnnnnnnnnnnnnnnnnnnnnnnnnnnnnnnnnnnnnnnnnnnnnnnnnnnnnnnnnnnnnnnnnnnnnnnnnnnnnnnnnnnnnnnnnnnnnnnnnnnnnnnnnnnnnnnnnnnnnnnnnnnnnnnnnnnnnnnnnnnnnnnnnnnnnnnnnnnnnnnnnnnnnnnnnnnnnnnnnnnnnnnnnnnnnnnnnnnnnnnnnnnnnnnnnnnnnnnnnnnnnnnnnnnnnnnnnnnnnnnnnnnnnnnnnnnnnnnnnnnnnnnnnnnnnnnnnnnnnnnnnnnnnnnnnnnnnnnnnnnnnnnnnnnnnnnnnnnnnnnnnnnnnnnnnnnnnnnnnnnnnnnnnnnnnnnnnnnnnnnnnnnnnnnnnnnnnnnnnnnnnnnnnnnnnnnnnnnnnnnnnnnnnnnnnnnnnnnnnnnnnnnnnnnnnnnnnnnnnnnnnnnnnnnnnnnnnnnnnnnnnnnnnnnnnnnnnnnnnnnnnnnnnnnnnnnnnnnnnnnnnnnnnnnnnnnnnnnnnnnnnnnnnnnnnnnnnnnnnnnnnnnnnnnnnnnnnnnnnnnnnnnnnnnnnnnnnnnnnnnnnnnnnnnnnnnnnnnnnnnnnnnnnnnnnnnnnnnnnnnnnnnnnnnnnnnnnnnnnnnnnnnnnnnnnnnnnnnnnnnnnnnnnnnnnnnnnnnnnnnnnnnnnnnnnnnnnnnnnnnnnnnnnnnnnnnnnnnnnnnnnnnnnnnnnnnnnnnnnnnnnnnnnnnnnnnnnnnnnnnnnnnnnnnnnnnnnnnnnnnnnnnnnnnnnnnnnnnnnnnnnnnnnnnnnnnnnnnnnnnnnnnnnnnnnnnnnnnnnnnnnnnnnnnnnnnnnnnnnnnnnnnnnnnnnnnnnnnnnnnnnnnnnnnnnnnnnnnnnnnnnnnnnnnnnnnnnnnnnnnnnnnnnnnnnnnnnnnnnnnnnnnnnnnnnnnnnnnnnnnnnnnnnnnnnnnnnnnnnnnnnnnnnnnnnnnnnnnnnnnnnnnnnnnnnnnnnnnnnnnnnnnnnnnnnnnnnnnnnnnnnnnnnnnnnnnnnnnnnnnnnnnnnnnnnnnnnnnnnnnnnnnnnnnnnnnnnnnnnnnnnnnnnnnnnnnnnnnnnnnnnnnnnnnnnnnnnnnnnnnnnnnnnnnnnnnnnnnnnnnnnnnnnnnnnnnnnnnnnnnnnnnnnnnnnnnnnnnnnnnnnnnnnnnnnnnnnnnnnnnnnnnnnnnnnnnnnnnnnnnnnnnnnnnnnnnnnnnnnnnnnnnnnnnnnnnnnnnnnnnnnnnnnnnnnnnnnnnnnnnnnnnnnnnnnnnnnnnnnnnnnnnnnnnnnnnnnnnnnnnnnnnnnnnnnnnnnnnnnnnnnnnnnnnnnnnnnnnnnnnnnnnnnnnnnnnnnnnnnnnnnnnnnnnnnnnnnnnnnnnnnnnnnnnnnnnnnnnnnnnnnnnnnnnnnnnnnnnnnnnnnnnnnnnnnnnnnnnnnnnnnnnnnnnnnnnnnnnnnnnnnnnnnnnnnnnnnnnnnnnnnnnnnnnnnnnnnnnnnnnnnnnnnnnnnnnnnnnnnnnnnnnnnnnnnnnnnnnnnnnnnnnnnnnnnnnnnnnnnnnnnnnnnnnnnnnnnnnnnnnnnnnnnnnnnnnnnnnnnnnnnnnnnnnnnnnnnnnnnnnnnnnnnnnnnnnnnnnnnnnnnnnnnnnnnnnnnnnnnnnnnnnnnnnnnnnnnnnnnnnnnnnnnnnnnnnnnnnnnnnnnnnnnnnnnnnnnnnnnnnnnnnnnnnnnnnnnnnnnnnnnnnnnnnnnnnnnnnnnnnnnnnnnnnnnnnnnnnnnnnnnnnnnnnnnnnnnnnnnnnnnnnnnnnnnnnnnnnnnnnnnnnnnnnnnnnnnnnnnnnnnnnnnnnnnnnnnnnnnnnnnnnnnnnnnnnnnnnnnnnnnnnnnnnnnnnnnnnnnnnnnnnnnnnnnnnnnnnnnnnnnnnnnnnnnnnnnnnnnnnnnnnnnnnnnnnnnnnnnnnnnnnnnnnnnnnnnnnnnnnnnnnnnnnnnnnnnnnnnnnnnnnnnnnnnnnnnnnnnnnnnnnnnnnnnnnnnnnnnnnnnnnnnnnnnnnnnnnnnnnnnnnnnnnnnnnnnnnnnnnnnnnnnnnnnnnnnnnnnnnnnnnnnnnnnnnnnnnnnnnnnnnnnnnnnnnnnnnnnnnnnnnnnnnnnnnnnnnnnnnnnnnnnnnnnnnnnnnnnnnnnnnnnnnnnnnnnnnnnnnnnnnnnnnnnnnnnnnnnnnnnnnnnnnnnnnnnnnnnnnnnnnnnnnnnnnnnnnnnnnnnnnnnnnnnnnnnnnnnnnnnnnnnnnnnnnnnnnnnnnnnnnnnnnnnnnnnnnnnnnnnnnnnnnnnnnnnnnnnnnnnnnnnnnnnnnnnnnnnnnnnnnnnnnnnnnnnnnnnnnnnnnnnnnnnnnnnnnnnnnnnnnnnnnnnnnnnnnnnnnnnnnnnnnnnnnnnnnnnnnnnnnnnnnnnnnnnnnnnnnnnnnnnnnnnnnnnnnnnnnnnnnnnnnnnnnnnnnnnnnnnnnnnnnnnnnnnnnnnnnnnnnnnnnnnnnnnnnnnnnnnnnnnnnnnnnnnnnnnnnnnnnnnnnnnnnnnnnnnnnnnnnnnnnnnnnnnnnnnnnnnnnnnnnnnnnnnnnnnnnnnnnnnnnnnnnnnnnnnnnnnnnnnnnnnnnnnnnnnnnnnnnnnnnnnnnnnnnnnnnnnnnnnnnnnnnnnnnnnnnnnnnnnnnnnnnnnnnnnnnnnnnnnnnnnnnnnnnnnnnnnnnnnnnnnnnnnnnnnnnnnnnnnnnnnnnnnnnnnnnnnnnnnnnnnnnnnnnnnnnnnnnnnnnnnnnnnnnnnnnnnnnnnnnnnnnnnnnnnnnnnnnnnnnnnnnnnnnnnnnnnnnnnnnnnnnnnnnnnnnnnnnnnnnnnnnnnnnnnnnnnnnnnnnnnnnnnnnnnnnnnnnnnnnnnnnnnnnnnnnnnnnnnnnnnnnnnnnnnnnnnnnnnnnnnnnnnnnnnnnnnnnnnnnnnnnnnnnnnnnnnnnnnnnnnnnnnnnnnnnnnnnnnnnnnnnnnnnnnnnnnnnnnnnnnnnnnnnnnnnnnnnnnnnnnnnnnnnnnnnnnnnnnnnnnnnnnnnnnnnnnnnnnnnnnnnnnnnnnnnnnnnnnnnnnnnnnnnnnnnnnnnnnnnnnnnnnnnnnnnnnnnnnnnnnnnnnnnnnnnnnnnnnnnnnnnnnnnnnnnnnnnnnnnnnnnnnnnnnnnnnnnnnnnnnnnnnnnnnnnnnnnnnnnnnnnnnnnnnnnnnnnnnnnnnnnnnnnnnnnnnnnnnnnnnnnnnnnnnnnnnnnnnnnnnnnnnnnnnnnnnnnnnnnnnnnnnnnnnnnnnnnnnnnnnnnnnnnnnnnnnnnnnnnnnnnnnnnnnnnnnnnnnnnnnnnnnnnnnnnnnnnnnnnnnnnnnnnnnnnnnnnnnnnnnnnnnnnnnnnnnnnnnnnnnnnnnnnnnnnnnnnnnnnnnnnnnnnnnnnnnnnnnnnnnnnnnnnnnnnnnnnnnnnnnnnnnnnnnnnnnnnnnnnnnnnnnnnnnnnnnnnnnnnnnnnnnnnnnnnnnnnnnnnnnnnnnnnnnnnnnnnnnnnnnnnnnnnnnnnnnnnnnnnnnnnnnnnnnnnnnnnnnnnnnnnnnnnnnnnnnnnnnnnnnnnnnnnnnnnnnnnnnnnnnnnnnnnnnnnnnnnnnnnnnnnnnnnnnnnnnnnnnnnnnnnnnnnnnnnnnnnnnnnnnnnnnnnnnnnnnnnnnnnnnnnnnnnnnnnnnnnnnnnnnnnnnnnnnnnnnnnnnnnnnnnnnnnnnnnnnnnnnnnnnnnnnnnnnnnnnnnnnnnnnnnnnnnnnnnnnnnnnnnnnnnnnnnnnnnnnnnnnnnnnnnnnnnnnnnnnnnnnnnnnnnnnnnnnnnnnnnnnnnnnnnnnnnnnnnnnnnnnnnnnnnnnnnnnnnnnnnnnnnnnnnnnnnnnnnnnnnnnnnnnnnnnnnnnnnnnnnnnnnnnnnnnnnnnnnnnnnnnnnnnnnnnnnnnnnnnnnnnnnnnnnnnnnnnnnnnnnnnnnnnnnnnnnnnnnnnnnnnnnnnnnnnnnnnnnnnnnnnnnnnnnnnnnnnnnnnnnnnnnnnnnnnnnnnnnnnnnnnnnnnnnnnnnnnnnnnnnnnnnnnnnnnnnnnnnnnnnnnnnnnnnnnnnnnnnnnnnnnnnnnnnnnnnnnnnnnnnnnnnnnnnnnnnnnnnnnnnnnnnnnnnnnnnnnnnnnnnnnnnnnnnnnnnnnnnnnnnnnnnnnnnnnnnnnnnnnnnnnnnnnnnnnnnnnnnnnnnnnnnnnnnnnnnnnnnnnnnnnnnnnnnnnnnnnnnnnnnnnnnnnnnnnnnnnnnnnnnnnnnnnnnnnnnnnnnnnnnnnnnnnnnnnnnnnnnnnnnnnnnnnnnnnnnnnnnnnnnnnnnnnnnnnnnnnnnnnnnnnnnnnnnnnnnnnnnnnnnnnnnnnnnnnnnnnnnnnnnnnnnnnnnnnnnnnnnnnnnnnnnnnnnnnnnnnnnnnnnnnnnnnnnnnnnnnnnnnnnnnnnnnnnnnnnnnnnnnnnnnnnnnnnnnnnnnnnnnnnnnnnnnnnnnnnnnnnnnnnnnnnnnnnnnnnnnnnnnnnnnnnnnnnnnnnnnnnnnnnnnnnnnnnnnnnnnnnnnnnnnnnnnnnnnnnnnnnnnnnnnnnnnnnnnnnnnnnnnnnnnnnnnnnnnnnnnnnnnnnnnnnnnnnnnnnnnnnnnnnnnnnnnnnnnnnnnnnnnnnnnnnnnnnnnnnnnnnnnnnnnnnnnnnnnnnnnnnnnnnnnnnnnnnnnnnnnnnnnnnnnnnnnnnnnnnnnnnnnnnnnnnnnnnnnnnnnnnnnnnnnnnnnnnnnnnnnnnnnnnnnnnnnnnnnnnnnnnnnnnnnnnnnnnnnnnnnnnnnnnnnnnnnnnnnnnnnnnnnnnnnnnnnnnnnnnnnnnnnnnnnnnnnnnnnnnnnnnnnnnnnnnnnnnnnnnnnnnnnnnnnnnnnnnnnnnnnnnnnnnnnnnnnnnnnnnnnnnnnnnnnnnnnnnnnnnnnnnnnnnnnnnnnnnnnnnnnnnnnnnnnnnnnnnnnnnnnnnnnnnnnnnnnnnnnnnnnnnnnnnnnnnnnnnnnnnnnnnnnnnnnnnnnnnnnnnnnnnnnnnnnnnnnnnnnnnnnnnnnnnnnnnnnnnnnnnnnnnnnnnnnnnnnnnnnnnnnnnnnnnnnnnnnnnnnnnnnnnnnnnnnnnnnnnnnnnnnnnnnnnnnnnnnnnnnnnnnnnnnnnnnnnnnnnnnnnnnnnnnnnnnnnnnnnnnnnnnnnnnnnnnnnnnnnnnnnnnnnnnnnnnnnnnnnnnnnnnnnnnnnnnnnnnnnnnnnnnnnnnnnnnnnnnnnnnnnnnnnnnnnnnnnnnnnnnnnnnnnnnnnnnnnnnnnnnnnnnnnnnnnnnnnnnnnnnnnnnnnnnnnnnnnnnnnnnnnnnnnnnnnnnnnnnnnnnnnnnnnnnnnnnnnnnnnnnnnnnnnnnnnnnnnnnnnnnnnnnnnnnnnnnnnnnnnnnnnnnnnnnnnnnnnnnnnnnnnnnnnnnnnnnnnnnnnnnnnnnnnnnnnnnnnnnnnnnnnnnnnnnnnnnnnnnnnnnnnnnnnnnnnnnnnnnnnnnnnnnnnnnnnnnnnnnnnnnnnnnnnnnnnnnnnnnnnnnnnnnnnnnnnnnnnnnnnnnnnnnnnnnnnnnnnnnnnnnnnnnnnnnnnnnnnnnnnnnnnnnnnnnnnnnnnnnnnnnnnnnnnnnnnnnnnnnnnnnnnnnnnnnnnnnnnnnnnnnnnnnnnnnnnnnnnnnnnnnnnnnnnnnnnnnnnnnnnnnnnnnnnnnnnnnnnnnnnnnnnnnnnnnnnnnnnnnnnnnnnnnnnnnnnnnnnnnnnnnnnnnnnnnnnnnnnnnnnnnnnnnnnnnnnnnnnnnnnnnnnnnnnnnnnnnnnnnnnnnnnnnnnnnnnnnnnnnnnnnnnnnnnnnnnnnnnnnnnnnnnnnnnnnnnnnnnnnnnnnnnnnnnnnnnnnnnnnnnnnnnnnnnnnnnnnnnnnnnnnnnnnnnnnnnnnnnnnnnnnnnnnnnnnnnnnnnnnnnnnnnnnnnnnnnnnnnnnnnnnnnnnnnnnnnnnnnnnnnnnnnnnnnnnnnnnnnnnnnnnnnnnnnnnnnnnnnnnnnnnnnnnnnnnnnnnnnnnnnnnnnnnnnnnnnnnnnnnnnnnnnnnnnnnnnnnnnnnnnnnnnnnnnnnnnnnnnnnnnnnnnnnnnnnnnnnnnnnnnnnnnnnnnnnnnnnnnnnnnnnnnnnnnnnnnnnnnnnnnnnnnnnnnnnnnnnnnnnnnnnnnnnnnnnnnnnnnnnnnnnnnnnnnnnnnnnnnnnnnnnnnnnnnnnnnnnnnnnnnnnnnnnnnnnnnnnnnnnnnnnnnnnnnnnnnnnnnnnnnnnnnnnnnnnnnnnnnnnnnnnnnnnnnnnnnnnnnnnnnnnnnnnnnnnnnnnnnnnnnnnnnnnnnnnnnnnnnnnnnnnnnnnnnnnnnnnnnnnnnnnnnnnnnnnnnnnnnnnnnnnnnnnnnnnnnnnnnnnnnnnnnnnnnnnnnnnnnnnnnnnnnnnnnnnnnnnnnnnnnnnnnnnnnnnnnnnnnnnnnnnnnnnnnnnnnnnnnnnnnnnnnnnnnnnnnnnnnnnnnnnnnnnnnnnnnnnnnnnnnnnnnnnnnnnnnnnnnnnnnnnnnnnnnnnnnnnnnnnnnnnnnnnnnnnnnnnnnnnnnnnnnnnnnnnnnnnnnnnnnnnnnnnnnnnnnnnnnnnnnnnnnnnnnnnnnnnnnnnnnnnnnnnnnnnnnnnnnnnnnnnnnnnnnnnnnnnnnnnnnnnnnnnnnnnnnnnnnnnnnnnnnnnnnnnnnnnnnnnnnnnnnnnnnnnnnnnnnnnnnnnnnnnnnnnnnnnnnnnnnnnnnnnnnnnnnnnnnnnnnnnnnnnnnnnnnnnnnnnnnnnnnnnnnnnnnnnnnnnnnnnnnnnnnnnnnnnnnnnnnnnnnnnnnnnnnnnnnnnnnnnnnnnnnnnnnnnnnnnnnnnnnnnnnnnnnnnnnnnnnnnnnnnnnnnnnnnnnnnnnnnnnnnnnnnnnnnnnnnnnnnnnnnnnnnnnnnnnnnnnnnnnnnnnnnnnnnnnnnnnnnnnnnnnnnnnnnnnnnnnnnnnnnnnnnnnnnnnnnnnnnnnnnnnnnnnnnnnnnnnnnnnnnnnnnnnnnnnnnnnnnnnnnnnnnnnnnnnnnnnnnnnnnnnnnnnnnnnnnnnnnnnnnnnnnnnnnnnnnnnnnnnnnnnnnnnnnnnnnnnnnnnnnnnnnnnnnnnnnnnnnnnnnnnnnnnnnnnnnnnnnnnnnnnnnnnnnnnnnnnnnnnnnnnnnnnnnnnnnnnnnnnnnnnnnnnnnnnnnnnnnnnnnnnnnnnnnnnnnnnnnnnnnnnnnnnnnnnnnnnnnnnnnnnnnnnnnnnnnnnnnnnnnnnnnnnnnnnnnnnnnnnnnnnnnnnnnnnnnnnnnnnnnnnnnnnnnnnnnnnnnnnnnnnnnnnnnnnnnnnnnnnnnnnnnnnnnnnnnnnnnnnnnnnnnnnnnnnnnnnnnnnnnnnnnnnnnnnnnnnnnnnnnnnnnnnnnnnnnnnnnnnnnnnnnnnnnnnnnnnnnnnnnnnnnnnnnnnnnnnnnnnnnnnnnnnnnnnnnnnnnnnnnnnnnnnnnnnnnnnnnnnnnnnnnnnnnnnnnnnnnnnnnnnnnnnnnnnnnnnnnnnnnnnnnnnnnnnnnnnnnnnnnnnnnnnnnnnnnnnnnnnnnnnnnnnnnnnnnnnnnnnnnnnnnnnnnnnnnnnnnnnnnnnnnnnnnnnnnnnnnnnnnnnnnnnnnnnnnnnnnnnnnnnnnnnnnnnnnnnnnnnnnnnnnnnnnnnnnnnnnnnnnnnnnnnnnnnnnnnnnnnnnnnnnnnnnnnnnnnnnnnnnnnnnnnnnnnnnnnnnnnnnnnnnnnnnnnnnnnnnnnnnnnnnnnnnnnnnnnnnnnnnnnnnnnnnnnnnnnnnnnnnnnnnnnnnnnnnnnnnnnnnnnnnnnnnnnnnnnnnnnnnnnnnnnnnnnnnnnnnnnnnnnnnnnnnnnnnnnnnnnnnnnnnnnnnnnnnnnnnnnnnnnnnnnnnnnnnnnnnnnnnnnnnnnnnnnnnnnnnnnnnnnnnnnnnnnnnnnnnnnnnnnnnnnnnnnnnnnnnnnnnnnnnnnnnnnnnnnnnnnnnnnnnnnnnnnnnnnnnnnnnnnnnnnnnnnnnnnnnnnnnnnnnnnnnnnnnnnnnnnnnnnnnnnnnnnnnnnnnnnnnnnnnnnnnnnnnnnnnnnnnnnnnnnnnnnnnnnnnnnnnnnnnnnnnnnnnnnnnnnnnnnnnnnnnnnnnnnnnnnnnnnnnnnnnnnnnnnnnnnnnnnnnnnnnnnnnnnnnnnnnnnnnnnnnnnnnnnnnnnnnnnnnnnnnnnnnnnnnnnnnnnnnnnnnnnnnnnnnnnnnnnnnnnnnnnnnnnnnnnnnnnnnnnnnnnnnnnnnnnnnnnnnnnnnnnnnnnnnnnnnnnnnnnnnnnnnnnnnnnnnnnnnnnnnnnnnnnnnnnnnnnnnnnnnnnnnnnnnnnnnnnnnnnnnnnnnnnnnnnnnnnnnnnnnnnnnnnnnnnnnnnnnnnnnnnnnnnnnnnnnnnnnnnnnnnnnnnnnnnnnnnnnnnnnnnnnnnnnnnnnnnnnnnnnnnnnnnnnnnnnnnnnnnnnnnnnnnnnnnnnnnnnnnnnnnnnnnnnnnnnnnnnnnnnnnnnnnnnnnnnnnnnnnnnnnnnnnnnnnnnnnnnnnnnnnnnnnnnnnnnnnnnnnnnnnnnnnnnnnnnnnnnnnnnnnnnnnnnnnnnnnnnnnnnnnnnnnnnnnnnnnnnnnnnnnnnnnnnnnnnnnnnnnnnnnnnnnnnnnnnnnnnnnnnnnnnnnnnnnnnnnnnnnnnnnnnnnnnnnnnnnnnnnnnnnnnnnnnnnnnnnnnnnnnnnnnnnnnnnnnnnnnnnnnnnnnnnnnnnnnnnnnnnnnnnnnnnnnnnnnnnnnnnnnnnnnnnnnnnnnnnnnnnnnnnnnnnnnnnnnnnnnnnnnnnnnnnnnnnnnnnnnnnnnnnnnnnnnnnnnnnnnnnnnnnnnnnnnnnnnnnnnnnnnnnnnnnnnnnnnnnnnnnnnnnnnnnnnnnnnnnnnnnnnnnnnnnnnnnnnnnnnnnnnnnnnnnnnnnnnnnnnnnnnnnnnnnnnnnnnnnnnnnnnnnnnnnnnnnnnnnnnnnnnnnnnnnnnnnnnnnnnnnnnnnnnnnnnnnnnnnnnnnnnnnnnnnnnnnnnnnnnnnnnnnnnnnnnnnnnnnnnnnnnnnnnnnnnnnnnnnnnnnnnnnnnnnnnnnnnnnnnnnnnnnnnnnnnnnnnnnnnnnnnnnnnnnnnnnnnnnnnnnnnnnnnnnnnnnnnnnnnnnnnnnnnnnnnnnnnnnnnnnnnnnnnnnnnnnnnnnnnnnnnnnnnnnnnnnnnnnnnnnnnnnnnnnnnnnnnnnnnnnnnnnnnnnnnnnnnnnnnnnnnnnnnnnnnnnnnnnnnnnnnnnnnnnnnnnnnnnnnnnnnnnnnnnnnnnnnnnnnnnnnnnnnnnnnnnnnnnnnnnnnnnnnnnnnnnnnnnnnnnnnnnnnnnnnnnnnnnnnnnnnnnnnnnnnnnnnnnnnnnnnnnnnnnnnnnnnnnnnnnnnnnnnnnnnnnnnnnnnnnnnnnnnnnnnnnnnnnnnnnnnnnnnnnnnnnnnnnnnnnnnnnnnnnnnnnnnnnnnnnnnnnnnnnnnnnnnnnnnnnnnnnnnnnnnnnnnnnnnnnnnnnnnnnnnnnnnnnnnnnnnnnnnnnnnnnnnnnnnnnnnnnnnnnnnnnnnnnnnnnnnnnnnnnnnnnnnnnnnnnnnnnnnnnnnnnnnnnnnnnnnnnnnnnnnnnnnnnnnnnnnnnnnnnnnnnnnnnnnnnnnnnnnnnnnnnnnnnnnnnnnnnnnnnnnnnnnnnnnnnnnnnnnnnnnnnnnnnnnnnnnnnnnnnnnnnnnnnnnnnnnnnnnnnnnnnnnnnnnnnnnnnnnnnnnnnnnnnnnnnnnnnnnnnnnnnnnnnnnnnnnnnnnnnnnnnnnnnnnnnnnnnnnnnnnnnnnnnnnnnnnnnnnnnnnnnnnnnnnnnnnnnnnnnnnnnnnnnnnnnnnnnnnnnnnnnnnnnnnnnnnnnnnnnnnnnnnnnnnnnnnnnnnnnnnnnnnnnnnnnnnnnnnnnnnnnnnnnnnnnnnnnnnnnnnnnnnnnnnnnnnnnnnnnnnnnnnnnnnnnnnnnnnnnnnnnnnnnnnnnnnnnnnnnnnnnnnnnnnnnnnnnnnnnnnnnnnnnnnnnnnnnnnnnnnnnnnnnnnnnnnnnnnnnnnnnnnnnnnnnnnnnnnnnnnnnnnnnnnnnnnnnnnnnnnnnnnnnnnnnnnnnnnnnnnnnnnnnnnnnnnnnnnnnnnnnnnnnnnnnnnnnnnnnnnnnnnnnnnnnnnnnnnnnnnnnnnnnnnnnnnnnnnnnnnnnnnnnnnnnnnnnnnnnnnnnnnnnnnnnnnnnnnnnnnnnnnnnnnnnnnnnnnnnnnnnnnnnnnnnnnnnnnnnnnnnnnnnnnnnnnnnnnnnnnnnnnnnnnnnnnnnnnnnnnnnnnnnnnnnnnnnnnnnnnnnnnnnnnnnnnnnnnnnnnnnnnnnnnnnnnnnnnnnnnnnnnnnnnnnnnnnnnnnnnnnnnnnnnnnnnnnnnnnnnnnnnnnnnnnnnnnnnnnnnnnnnnnnnnnnnnnnnnnnnnnnnnnnnnnnnnnnnnnnnnnnnnnnnnnnnnnnnnnnnnnnnnnnnnnnnnnnnnnnnnnnnnnnnnnnnnnnnnnnnnnnnnnnnnnnnnnnnnnnnnnnnnnnnnnnnnnnnnnnnnnnnnnnnnnnnnnnnnnnnnnnnnnnnnnnnnnnnnnnnnnnnnnnnnnnnnnnnnnnnnnnnnnnnnnnnnnnnnnnnnnnnnnnnnnnnnnnnnnnnnnnnnnnnnnnnnnnnnnnnnnnnnnnnnnnnnnnnnnnnnnnnnnnnnnnnnnnnnnnnnnnnnnnnnnnnnnnnnnnnnnnnnnnnnnnnnnnnnnnnnnnnnnnnnnnnnnnnnnnnnnnnnnnnnnnnnnnnnnnnnnnnnnnnnnnnnnnnnnnnnnnnnnnnnnnnnnnnnnnnnnnnnnnnnnnnnnnnnnnnnnnnnnnnnnnnnnnnnnnnnnnnnnnnnnnnnnnnnnnnnnnnnnnnnnnnnnnnnnnnnnnnnnnnnnnnnnnnnnnnnnnnnnnnnnnnnnnnnnnnnnnnnnnnnnnnnnnnnnnnnnnnnnnnnnnnnnnnnnnnnnnnnnnnnnnnnnnnnnnnnnnnnnnnnnnnnnnnnnnnnnnnnnnnnnnnnnnnnnnnnnnnnnnnnnnnnnnnnnnnnnnnnnnnnnnnnnnnnnnnnnnnnnnnnnnnnnnnnnnnnnnnnnnnnnnnnnnnnnnnnnnnnnnnnnnnnnnnnnnnnnnnnnnnnnnnnnnnnnnnnnnnnnnnnnnnnnnnnnnnnnnnnnnnnnnnnnnnnnnnnnnnnnnnnnnnnnnnnnnnnnnnnnnnnnnnnnnnnnnnnnnnnnnnnnnnnnnnnnnnnnnnnnnnnnnnnnnnnnnnnnnnnnnnnnnnnnnnnnnnnnnnnnnnnnnnnnnnnnnnnnnnnnnnnnnnnnnnnnnnnnnnnnnnnnnnnnnnnnnnnnnnnnnnnnnnnnnnnnnnnnnnnnnnnnnnnnnnnnnnnnnnnnnnnnnnnnnnnnnnnnnnnnnnnnnnnnnnnnnnnnnnnnnnnnnnnnnnnnnnnnnnnnnnnnnnnnnnnnnnnnnnnnnnnnnnnnnnnnnnnnnnnnnnnnnnnnnnnnnnnnnnnnnnnnnnnnnnnnnnnnnnnnnnnnnnnnnnnnnnnnnnnnnnnnnnnnnnnnnnnnnnnnnnnnnnnnnnnnnnnnnnnnnnnnnnnnnnnnnnnnnnnnnnnnnnnnnnnnnnnnnnnnnnnnnnnnnnnnnnnnnnnnnnnnnnnnnnnnnnnnnnnnnnnnnnnnnnnnnnnnnnnnnnnnnnnnnnnnnnnnnnnnnnnnnnnnnnnnnnnnnnnnnnnnnnnnnnnnnnnnnnnnnnnnnnnnnnnnnnnnnnnnnnnnnnnnnnnnnnnnnnnnnnnnnnnnnnnnnnnnnnnnnnnnnnnnnnnnnnnnnnnnnnnnnnnnnnnnnnnnnnnnnnnnnnnnnnnnnnnnnnnnnnnnnnnnnnnnnnnnnnnnnnnnnnnnnnnnnnnnnnnnnnnnnnnnnnnnnnnnnnnnnnnnnnnnnnnnnnnnnnnnnnnnnnnnnnnnnnnnnnnnnnnnnnnnnnnnnnnnnnnnnnnnnnnnnnnnnnnnnnnnnnnnnnnnnnnnnnnnnnnnnnnnnnnnnnnnnnnnnnnnnnnnnnnnnnnnnnnnnnnnnnnnnnnnnnnnnnnnnnnnnnnnnnnnnnnnnnnnnnnnnnnnnnnnnnnnnnnnnnnnnnnnnnnnnnnnnnnnnnnnnnnnnnnnnnnnnnnnnnnnnnnnnnnnnnnnnnnnnnnnnnnnnnnnnnnnnnnnnnnnnnnnnnnnnnnnnnnnnnnnnnnnnnnnnnnnnnnnnnnnnnnnnnnnnnnnnnnnnnnnnnnnnnnnnnnnnnnnnnnnnnnnnnnnnnnnnnnnnnnnnnnnnnnnnnnnnnnnnnnnnnnnnnnnnnnnnnnnnnnnnnnnnnnnnnnnnnnnnnnnnnnnnnnnnnnnnnnnnnnnnnnnnnnnnnnnnnnnnnnnnnnnnnnnnnnnnnnnnnnnnnnnnnnnnnnnnnnnnnnnnnnnnnnnnnnnnnnnnnnnnnnnnnnnnnnnnnnnnnnnnnnnnnnnnnnnnnnnnnnnnnnnnnnnnnnnnnnnnnnnnnnnnnnnnnnnnnnnnnnnnnnnnnnnnnnnnnnnnnnnnnnnnnnnnnnnnnnnnnnnnnnnnnnnnnnnnnnnnnnnnnnnnnnnnnnnnnnnnnnnnnnnnnnnnnnnnnnnnnnnnnnnnnnnnnnnnnnnnnnnnnnnnnnnnnnnnnnnnnnnnnnnnnnnnnnnnnnnnnnnnnnnnnnnnnnnnnnnnnnnnnnnnnnnnnnnnnnnnnnnnnnnnnnnnnnnnnnnnnnnnnnnnnnnnnnnnnnnnnnnnnnnnnnnnnnnnnnnnnnnnnnnnnnnnnnnnnnnnnnnnnnnnnnnnnnnnnnnnnnnnnnnnnnnnnnnnnnnnnnnnnnnnnnnnnnnnnnnnnnnnnnnnnnnnnnnnnnnnnnnnnnnnnnnnnnnnnnnnnnnnnnnnnnnnnnnnnnnnnnnnnnnnnnnnnnnnnnnnnnnnnnnnnnnnnnnnnnnnnnnnnnnnnnnnnnnnnnnnnnnnnnnnnnnnnnnnnnnnnnnnnnnnnnnnnnnnnnnnnnnnnnnnnnnnnnnnnnnnnnnnnnnnnnnnnnnnnnnnnnnnnnnnnnnnnnnnnnnnnnnnnnnnnnnnnnnnnnnnnnnnnnnnnnnnnnnnnnnnnnnnnnnnnnnnnnnnnnnnnnnnnnnnnnnnnnnnnnnnnnnnnnnnnnnnnnnnnnnnnnnnnnnnnnnnnnnnnnnnnnnnnnnnnnnnnnnnnnnnnnnnnnnnnnnnnnnnnnnnnnnnnnnnnnnnnnnnnnnnnnnnnnnnnnnnnnnnnnnnnnnnnnnnnnnnnnnnnnnnnnnnnnnnnnnnnnnnnnnnnnnnnnnnnnnnnnnnnnnnnnnnnnnnnnnnnnnnnnnnnnnnnnnnnnnnnnnnnnnnnnnnnnnnnnnnnnnnnnnnnnnnnnnnnnnnnnnnnnnnnnnnnnnnnnnnnnnnnnnnnnnnnnnnnnnnnnnnnnnnnnnnnnnnnnnnnnnnnnnnnnnnnnnnnnnnnnnnnnnnnnnnnnnnnnnnnnnnnnnnnnnnnnnnnnnnnnnnnnnnnnnnnnnnnnnnnnnnnnnnnnnnnnnnnnnnnnnnnnnnnnnnnnnnnnnnnnnnnnnnnnnnnnnnnnnnnnnnnnnnnnnnnnnnnnnnnnnnnnnnnnnnnnnnnnnnnnnnnnnnnnnnnnnnnnnnnnnnnnnnnnnnnnnnnnnnnnnnnnnnnnnnnnnnnnnnnnnnnnnnnnnnnnnnnnnnnnnnnnnnnnnnnnnnnnnnnnnnnnnnnnnnnnnnnnnnnnnnnnnnnnnnnnnnnnnnnnnnnnnnnnnnnnnnnnnnnnnnnnnnnnnnnnnnnnnnnnnnnnnnnnnnnnnnnnnnnnnnnnnnnnnnnnnnnnnnnnnnnnnnnnnnnnnnnnnnnnnnnnnnnnnnnnnnnnnnnnnnnnnnnnnnnnnnnnnnnnnnnnnnnnnnnnnnnnnnnnnnnnnnnnnnnnnnnnnnnnnnnnnnnnnnnnnnnnnnnnnnnnnnnnnnnnnnnnnnnnnnnnnnnnnnnnnnnnnnnnnnnnnnnnnnnnnnnnnnnnnnnnnnnnnnnnnnnnnnnnnnnnnnnnnnnnnnnnnnnnnnnnnnnnnnnnnnnnnnnnnnnnnnnnnnnnnnnnnnnnnnnnnnnnnnnnnnnnnnnnnnnnnnnnnnnnnnnnnnnnnnnnnnnnnnnnnnnnnnnnnnnnnnnnnnnnnnnnnnnnnnnnnnnnnnnnnnnnnnnnnnnnnnnnnnnnnnnnnnnnnnnnnnnnnnnnnnnnnnnnnnnnnnnnnnnnnnnnnnnnnnnnnnnnnnnnnnnnnnnnnnnnnnnnnnnnnnnnnnnnnnnnnnnnnnnnnnnnnnnnnnnnnnnnnnnnnnnnnnnnnnnnnnnnnnnnnnnnnnnnnnnnnnnnnnnnnnnnnnnnnnnnnnnnnnnnnnnnnnnnnnnnnnnnnnnnnnnnnnnnnnnnnnnnnnnnnnnnnnnnnnnnnnnnnnnnnnnnnnnnnnnnnnnnnnnnnnnnnnnnnnnnnnnnnnnnnnnnnnnnnnnnnnnnnnnnnnnnnnnnnnnnnnnnnnnnnnnnnnnnnnnnnnnnnnnnnnnnnnnnnnnnnnnnnnnnnnnnnnnnnnnnnnnnnnnnnnnnnnnnnnnnnnnnnnnnnnnnnnnnnnnnnnnnnnnnnnnnnnnnnnnnnnnnnnnnnnnnnnnnnnnnnnnnnnnnnnnnnnnnnnnnnnnnnnnnnnnnnnnnnnnnnnnnnnnnnnnnnnnnnnnnnnnnnnnnnnnnnnnnnnnnnnnnnnnnnnnnnnnnnnnnnnnnnnnnnnnnnnnnnnnnnnnnnnnnnnnnnnnnnnnnnnnnnnnnnnnnnnnnnnnnnnnnnnnnnnnnnnnnnnnnnnnnnnnnnnnnnnnnnnnnnnnnnnnnnnnnnnnnnnnnnnnnnnnnnnnnnnnnnnnnnnnnnnnnnnnnnnnnnnnnnnnnnnnnnnnnnnnnnnnnnnnnnnnnnnnnnnnnnnnnnnnnnnnnnnnnnnnnnnnnnnnnnnnnnnnnnnnnnnnnnnnnnnnnnnnnnnnnnnnnnnnnnnnnnnnnnnnnnnnnnnnnnnnnnnnnnnnnnnnnnnnnnnnnnnnnnnnnnnnnnnnnnnnnnnnnnnnnnnnnnnnnnnnnnnnnnnnnnnnnnnnnnnnnnnnnnnnnnnnnnnnnnnnnnnnnnnnnnnnnnnnnnnnnnnnnnnnnnnnnnnnnnnnnnnnnnnnnnnnnnnnnnnnnnnnnnnnnnnnnnnnnnnnnnnnnnnnnnnnnnnnnnnnnnnnnnnnnnnnnnnnnnnnnnnnnnnnnnnnnnnnnnnnnnnnnnnnnnnnnnnnnnnnnnnnnnnnnnnnnnnnnnnnnnnnnnnnnnnnnnnnnnnnnnnnnnnnnnnnnnnnnnnnnnnnnnnnnnnnnnnnnnnnnnnnnnnnnnnnnnnnnnnnnnnnnnnnnnnnnnnnnnnnnnnnnnnnnnnnnnnnnnnnnnnnnnnnnnnnnnnnnnnnnnnnnnnnnnnnnnnnnnnnnnnnnnnnnnnnnnnnnnnnnnnnnnnnnnnnnnnnnnnnnnnnnnnnnnnnnnnnnnnnnnnnnnnnnnnnnnnnnnnnnnnnnnnnnnnnnnnnnnnnnnnnnnnnnnnnnnnnnnnnnnnnnnnnnnnnnnnnnnnnnnnnnnnnnnnnnnnnnnnnnnnnnnnnnnnnnnnnnnnnnnnnnnnnnnnnnnnnnnnnnnnnnnnnnnnnnnnnnnnnnnnnnnnnnnnnnnnnnnnnnnnnnnnnnnnnnnnnnnnnnnnnnnnnnnnnnnnnnnnnnnnnnnnnnnnnnnnnnnnnnnnnnnnnnnnnnnnnnnnnnnnnnnnnnnnnnnnnnnnnnnnnnnnnnnnnnnnnnnnnnnnnnnnnnnnnnnnnnnnnnnnnnnnnnnnnnnnnnnnnnnnnnnnnnnnnnnnnnnnnnnnnnnnnnnnnnnnnnnnnnnnnnnnnnnnnnnnnnnnnnnnnnnnnnnnnnnnnnnnnnnnnnnnnnnnnnnnnnnnnnnnnnnnnnnnnnnnnnnnnnnnnnnnnnnnnnnnnnnnnnnnnnnnnnnnnnnnnnnnnnnnnnnnnnnnnnnnnnnnnnnnnnnnnnnnnnnnnnnnnnnnnnnnnnnnnnnnnnnnnnnnnnnnnnnnnnnnnnnnnnnnnnnnnnnnnnnnnnnnnnnnnnnnnnnnnnnnnnnnnnnnnnnnnnnnnnnnnnnnnnnnnnnnnnnnnnnnnnnnnnnnnnnnnnnnnnnnnnnnnnnnnnnnnnnnnnnnnnnnnnnnnnnnnnnnnnnnnnnnnnnnnnnnnnnnnnnnnnnnnnnnnnnnnnnnnnnnnnnnnnnnnnnnnnnnnnnnnnnnnnnnnnnnnnnnnnnnnnnnnnnnnnnnnnnnnnnnnnnnnnnnnnnnnnnnnnnnnnnnnnnnnnnnnnnnnnnnnnnnnnnnnnnnnnnnnnnnnnnnnnnnnnnnnnnnnnnnnnnnnnnnnnnnnnnnnnnnnnnnnnnnnnnnnnnnnnnnnnnnnnnnnnnnnnnnnnnnnnnnnnnnnnnnnnnnnnnnnnnnnnnnnnnnnnnnnnnnnnnnnnnnnnnnnnnnnnnnnnnnnnnnnnnnnnnnnnnnnnnnnnnnnnnnnnnnnnnnnnnnnnnnnnnnnnnnnnnnnnnnnnnnnnnnnnnnnnnnnnnnnnnnnnnnnnnnnnnnnnnnnnnnnnnnnnnnnnnnnnnnnnnnnnnnnnnnnnnnnnnnnnnnnnnnnnnnnnnnnnnnnnnnnnnnnnnnnnnnnnnnnnnnnnnnnnnnnnnnnnnnnnnnnnnnnnnnnnnnnnnnnnnnnnnnnnnnnnnnnnnnnnnnnnnnnnnnnnnnnnnnnnnnnnnnnnnnnnnnnnnnnnnnnnnnnnnnnnnnnnnnnnnnnnnnnnnnnnnnnnnnnnnnnnnnnnnnnnnnnnnnnnnnnnnnnnnnnnnnnnnnnnnnnnnnnnnnnnnnnnnnnnnnnnnnnnnnnnnnnnnnnnnnnnnnnnnnnnnnnnnnnnnnnnnnnnnnnnnnnnnnnnnnnnnnnnnnnnnnnnnnnnnnnnnnnnnnnnnnnnnnnnnnnnnnnnnnnnnnnnnnnnnnnnnnnnnnnnnnnnnnnnnnnnnnnnnnnnnnnnnnnnnnnnnnnnnnnnnnnnnnnnnnnnnnnnnnnnnnnnnnnnnnnnnnnnnnnnnnnnnnnnnnnnnnnnnnnnnnnnnnnnnnnnnnnnnnnnnnnnnnnnnnnnnnnnnnnnnnnnnnnnnnnnnnnnnnnnnnnnnnnnnnnnnnnnnnnnnnnnnnnnnnnnnnnnnnnnnnnnnnnnnnnnnnnnnnnnnnnnnnnnnnnnnnnnnnnnnnnnnnnnnnnnnnnnnnnnnnnnnnnnnnnnnnnnnnnnnnnnnnnnnnnnnnnnnnnnnnnnnnnnnnnnnnnnnnnnnnnnnnnnnnnnnnnnnnnnnnnnnnnnnnnnnnnnnnnnnnnnnnnnnnnnnnnnnnnnnnnnnnnnnnnnnnnnnnnnnnnnnnnnnnnnnnnnnnnnnnnnnnnnnnnnnnnnnnnnnnnnnnnnnnnnnnnnnnnnnnnnnnnnnnnnnnnnnnnnnnnnnnnnnnnnnnnnnnnnnnnnnnnnnnnnnnnnnnnnnnnnnnnnnnnnnnnnnnnnnnnnnnnnnnnnnnnnnnnnnnnnnnnnnnnnnnnnnnnnnnnnnnnnnnnnnnnnnnnnnnnnnnnnnnnnnnnnnnnnnnnnnnnnnnnnnnnnnnnnnnnnnnnnnnnnnnnnnnnnnnnnnnnnnnnnnnnnnnnnnnnnnnnnnnnnnnnnnnnnnnnnnnnnnnnnnnnnnnnnnnnnnnnnnnnnnnnnnnnnnnnnnnnnnnnnnnnnnnnnnnnnnnnnnnnnnnnnnnnnnnnnnnnnnnnnnnnnnnnnnnnnnnnnnnnnnnnnnnnnnnnnnnnnnnnnnnnnnnnnnnnnnnnnnnnnnnnnnnnnnnnnnnnnnnnnnnnnnnnnnnnnnnnnnnnnnnnnnnnnnnnnnnnnnnnnnnnnnnnnnnnnnnnnnnnnnnnnnnnnnnnnnnnnnnnnnnnnnnnnnnnnnnnnnnnnnnnnnnnnnnnnnnnnnnnnnnnnnnnnnnnnnnnnnnnnnnnnnnnnnnnnnnnnnnnnnnnnnnnnnnnnnnnnnnnnnnnnnnnnnnnnnnnnnnnnnnnnnnnnnnnnnnnnnnnnnnnnnnnnnnnnnnnnnnnnnnnnnnnnnnnnnnnnnnnnnnnnnnnnnnnnnnnnnnnnnnnnnnnnnnnnnnnnnnnnnnnnnnnnnnnnnnnnnnnnnnnnnnnnnnnnnnnnnnnnnnnnnnnnnnnnnnnnnnnnnnnnnnnnnnnnnnnnnnnnnnnnnnnnnnnnnnnnnnnnnnnnnnnnnnnnnnnnnnnnnnnnnnnnnnnnnnnnnnnnnnnnnnnnnnnnnnnnnnnnnnnnnnnnnnnnnnnnnnnnnnnnnnnnnnnnnnnnnnnnnnnnnnnnnnnnnnnnnnnnnnnnnnnnnnnnnnnnnnnnnnnnnnnnnnnnnnnnnnnnnnnnnnnnnnnnnnnnnnnnnnnnnnnnnnnnnnnnnnnnnnnnnnnnnnnnnnnnnnnnnnnnnnnnnnnnnnnnnnnnnnnnnnnnnnnnnnnnnnnnnnnnnnnnnnnnnnnnnnnnnnnnnnnnnnnnnnnnnnnnnnnnnnnnnnnnnnnnnnnnnnnnnnnnnnnnnnnnnnnnnnnnnnnnnnnnnnnnnnnnnnnnnnnnnnnnnnnnnnnnnnnnnnnnnnnnnnnnnnnnnnnnnnnnnnnnnnnnnnnnnnnnnnnnnnnnnnnnnnnnnnnnnnnnnnnnnnnnnnnnnnnnnnnnnnnnnnnnnnnnnnnnnnnnnnnnnnnnnnnnnnnnnnnnnnnnnnnnnnnnnnnnnnnnnnnnnnnnnnnnnnnnnnnnnnnnnnnnnnnnnnnnnnnnnnnnnnnnnnnnnnnnnnnnnnnnnnnnnnnnnnnnnnnnnnnnnnnnnnnnnnnnnnnnnnnnnnnnnnnnnnnnnnnnnnnnnnnnnnnnnnnnnnnnnnnnnnnnnnnnnnnnnnnnnnnnnnnnnnnnnnnnnnnnnnnnnnnnnnnnnnnnnnnnnnnnnnnnnnnnnnnnnnnnnnnnnnnnnnnnnnnnnnnnnnnnnnnnnnnnnnnnnnnnnnnnnnnnnnnnnnnnnnnnnnnnnnnnnnnnnnnnnnnnnnnnnnnnnnnnnnnnnnnnnnnnnnnnnnnnnnnnnnnnnnnnnnnnnnnnnnnnnnnnnnnnnnnnnnnnnnnnnnnnnnnnnnnnnnnnnnnnnnnnnnnnnnnnnnnnnnnnnnnnnnnnnnnnnnnnnnnnnnnnnnnnnnnnnnnnnnnnnnnnnnnnnnnnnnnnnnnnnnnnnnnnnnnnnnnnnnnnnnnnnnnnnnnnnnnnnnnnnnnnnnnnnnnnnnnnnnnnnnnnnnnnnnnnnnnnnnnnnnnnnnnnnnnnnnnnnnnnnnnnnnnnnnnnnnnnnnnnnnnnnnnnnnnnnnnnnnnnnnnnnnnnnnnnnnnnnnnnnnnnnnnnnnnnnnnnnnnnnnnnnnnnnnnnnnnnnnnnnnnnnnnnnnnnnnnnnnnnnnnnnnnnnnnnnnnnnnnnnnnnnnnnnnnnnnnnnnnnnnnnnnnnnnnnnnnnnnnnnnnnnnnnnnnnnnnnnnnnnnnnnnnnnnnnnnnnnnnnnnnnnnnnnnnnnnnnnnnnnnnnnnnnnnnnnnnnnnnnnnnnnnnnnnnnnnnnnnnnnnnnnnnnnnnnnnnnnnnnnnnnnnnnnnnnnnnnnnnnnnnnnnnnnnnnnnnnnnnnnnnnnnnnnnnnnnnnnnnnnnnnnnnnnnnnnnnnnnnnnnnnnnnnnnnnnnnnnnnnnnnnnnnnnnnnnnnnnnnnnnnnnnnnnnnnnnnnnnnnnnnnnnnnnnnnnnnnnnnnnnnnnnnnnnnnnnnnnnnnnnnnnnnnnnnnnnnnnnnnnnnnnnnnnnnnnnnnnnnnnnnnnnnnnnnnnnnnnnnnnnnnnnnnnnnnnnnnnnnnnnnnnnnnnnnnnnnnnnnnnnnnnnnnnnnnnnnnnnnnnnnnnnnnnnnnnnnnnnnnnnnnnnnnnnnnnnnnnnnnnnnnnnnnnnnnnnnnnnnnnnnnnnnnnnnnnnnnnnnnnnnnnnnnnnnnnnnnnnnnnnnnnnnnnnnnnnnnnnnnnnnnnnnnnnnnnnnnnnnnnnnnnnnnnnnnnnnnnnnnnnnnnnnnnnnnnnnnnnnnnnnnnnnnnnnnnnnnnnnnnnnnnnnnnnnnnnnnnnnnnnnnnnnnnnnnnnnnnnnnnnnnnnnnnnnnnnnnnnnnnnnnnnnnnnnnnnnnnnnnnnnnnnnnnnnnnnnnnnnnnnnnnnnnnnnnnnnnnnnnnnnnnnnnnnnnnnnnnnnnnnnnnnnnnnnnnnnnnnnnnnnnnnnnnnnnnnnnnnnnnnnnnnnnnnnnnnnnnnnnnnnnnnnnnnnnnnnnnnnnnnnnnnnnnnnnnnnnnnnnnnnnnnnnnnnnnnnnnnnnnnnnnnnnnnnnnnnnnnnnnnnnnnnnnnnnnnnnnnnnnnnnnnnnnnnnnnnnnnnnnnnnnnnnnnnnnnnnnnnnnnnnnnnnnnnnnnnnnnnnnnnnnnnnnnnnnnnnnnnnnnnnnnnnnnnnnnnnnnnnnnnnnnnnnnnnnnnnnnnnnnnnnnnnnnnnnnnnnnnnnnnnnnnnnnnnnnnnnnnnnnnnnnnnnnnnnnnnnnnnnnnnnnnnnnnnnnnnnnnnnnnnnnnnnnnnnnnnnnnnnnnnnnnnnnnnnnnnnnnnnnnnnnnnnnnnnnnnnnnnnnnnnnnnnnnnnnnnnnnnnnnnnnnnnnnnnnnnnnnnnnnnnnnnnnnnnnnnnnnnnnnnnnnnnnnnnnnnnnnnnnnnnnnnnnnnnnnnnnnnnnnnnnnnnnnnnnnnnnnnnnnnnnnnnnnnnnnnnnnnnnnnnnnnnnnnnnnnnnnnnnnnnnnnnnnnnnnnnnnnnnnnnnnnnnnnnnnnnnnnnnnnnnnnnnnnnnnnnnnnnnnnnnnnnnnnnnnnnnnnnnnnnnnnnnnnnnnnnnnnnnnnnnnnnnnnnnnnnnnnnnnnnnnnnnnnnnnnnnnnnnnnnnnnnnnnnnnnnnnnnnnnnnnnnnnnnnnnnnnnnnnnnnnnnnnnnnnnnnnnnnnnnnnnnnnnnnnnnnnnnnnnnnnnnnnnnnnnnnnnnnnnnnnnnnnnnnnnnnnnnnnnnnnnnnnnnnnnnnnnnnnnnnnnnnnnnnnnnnnnnnnnnnnnnnnnnnnnnnnnnnnnnnnnnnnnnnnnnnnnnnnnnnnnnnnnnnnnnnnnnnnnnnnnnnnnnnnnnnnnnnnnnnnnnnnnnnnnnnnnnnnnnnnnnnnnnnnnnnnnnnnnnnnnnnnnnnnnnnnnnnnnnnnnnnnnnnnnnnnnnnnnnnnnnnnnnnnnnnnnnnnnnnnnnnnnnnnnnnnnnnnnnnnnnnnnnnnnnnnnnnnnnnnnnnnnnnnnnnnnnnnnnnnnnnnnnnnnnnnnnnnnnnnnnnnnnnnnnnnnnnnnnnnnnnnnnnnnnnnnnnnnnnnnnnnnnnnnnnnnnnnnnnnnnnnnnnnnnnnnnnnnnnnnnnnnnnnnnnnnnnnnnnnnnnnnnnnnnnnnnnnnnnnnnnnnnnnnnnnnnnnnnnnnnnnnnnnnnnnnnnnnnnnnnnnnnnnnnnnnnnnnnnnnnnnnnnnnnnnnnnnnnnnnnnnnnnnnnnnnnnnnnnnnnnnnnnnnnnnnnnnnnnnnnnnnnnnnnnnnnnnnnnnnnnnnnnnnnnnnnnnnnnnnnnnnnnnnnnnnnnnnnnnnnnnnnnnnnnnnnnnnnnnnnnnnnnnnnnnnnnnnnnnnnnnnnnnnnnnnnnnnnnnnnnnnnnnnnnnnnnnnnnnnnnnnnnnnnnnnnnnnnnnnnnnnnnnnnnnnnnnnnnnnnnnnnnnnnnnnnnnnnnnnnnnnnnnnnnnnnnnnnnnnnnnnnnnnnnnnnnnnnnnnnnnnnnnnnnnnnnnnnnnnnnnnnnnnnnnnnnnnnnnnnnnnnnnnnnnnnnnnnnnnnnnnnnnnnnnnnnnnnnnnnnnnnnnnnnnnnnnnnnnnnnnnnnnnnnnnnnnnnnnnnnnnnnnnnnnnnnnnnnnnnnnnnnnnnnnnnnnnnnnnnnnnnnnnnnnnnnnnnnnnnnnnnnnnnnnnnnnnnnnnnnnnnnnnnnnnnnnnnnnnnnnnnnnnnnnnnnnnnnnnnnnnnnnnnnnnnnnnnnnnnnnnnnnnnnnnnnnnnnnnnnnnnnnnnnnnnnnnnnnnnnnnnnnnnnnnnnnnnnnnnnnnnnnnnnnnnnnnnnnnnnnnnnnnnnnnnnnnnnnnnnnnnnnnnnnnnnnnnnnnnnnnnnnnnnnnnnnnnnnnnnnnnnnnnnnnnnnnnnnnnnnnnnnnnnnnnnnnnnnnnnnnnnnnnnnnnnnnnnnnnnnnnnnnnnnnnnnnnnnnnnnnnnnnnnnnnnnnnnnnnnnnnnnnnnnnnnnnnnnnnnnnnnnnnnnnnnnnnnnnnnnnnnnnnnnnnnnnnnnnnnnnnnnnnnnnnnnnnnnnnnnnnnnnnnnnnnnnnnnnnnnnnnnnnnnnnnnnnnnnnnnnnnnnnnnnnnnnnnnnnnnnnnnnnnnnnnnnnnnnnnnnnnnnnnnnnnnnnnnnnnnnnnnnnnnnnnnnnnnnnnnnnnnnnnnnnnnnnnnnnnnnnnnnnnnnnnnnnnnnnnnnnnnnnnnnnnnnnnnnnnnnnnnnnnnnnnnnnnnnnnnnnnnnnnnnnnnnnnnnnnnnnnnnnnnnnnnnnnnnnnnnnnnnnnnnnnnnnnnnnnnnnnnnnnnnnnnnnnnnnnnnnnnnnnnnnnnnnnnnnnnnnnnnnnnnnnnnnnnnnnnnnnnnnnnnnnnnnnnnnnnnnnnnnnnnnnnnnnnnnnnnnnnnnnnnnnnnnnnnnnnnnnnnnnnnnnnnnnnnnnnnnnnnnnnnnnnnnnnnnnnnnnnnnnnnnnnnnnnnnnnnnnnnnnnnnnnnnnnnnnnnnnnnnnnnnnnnnnnnnnnnnnnnnnnnnnnnnnnnnnnnnnnnnnnnnnnnnnnnnnnnnnnnnnnnnnnnnnnnnnnnnnnnnnnnnnnnnnnnnnnnnnnnnnnnnnnnnnnnnnnnnnnnnnnnnnnnnnnnnnnnnnnnnnnnnnnnnnnnnnnnnnnnnnnnnnnnnnnnnnnnnnnnnnnnnnnnnnnnnnnnnnnnnnnnnnnnnnnnnnnnnnnnnnnnnnnnnnnnnnnnnnnnnnnnnnnnnnnnnnnnnnnnnnnnnnnnnnnnnnnnnnnnnnnnnnnnnnnnnnnnnnnnnnnnnnnnnnnnnnnnnnnnnnnnnnnnnnnnnnnnnnnnnnnnnnnnnnnnnnnnnnnnnnnnnnnnnnnnnnnnnnnnnnnnnnnnnnnnnnnnnnnnnnnnnnnnnnnnnnnnnnnnnnnnnnnnnnnnnnnnnnnnnnnnnnnnnnnnnnnnnnnnnnnnnnnnnnnnnnnnnnnnnnnnnnnnnnnnnnnnnnnnnnnnnnnnnnnnnnnnnnnnnnnnnnnnnnnnnnnnnnnnnnnnnnnnnnnnnnnnnnnnnnnnnnnnnnnnnnnnnnnnnnnnnnnnnnnnnnnnnnnnnnnnnnnnnnnnnnnnnnnnnnnnnnnnnnnnnnnnnnnnnnnnnnnnnnnnnnnnnnnnnnnnnnnnnnnnnnnnnnnnnnnnnnnnnnnnnnnnnnnnnnnnnnnnnnnnnnnnnnnnnnnnnnnnnnnnnnnnnnnnnnnnnnnnnnnnnnnnnnnnnnnnnnnnnnnnnnnnnnnnnnnnnnnnnnnnnnnnnnnnnnnnnnnnnnnnnnnnnnnnnnnnnnnnnnnnnnnnnnnnnnnnnnnnnnnnnnnnnnnnnnnnnnnnnnnnnnnnnnnnnnnnnnnnnnnnnnnnnnnnnnnnnnnnnnnnnnnnnnnnnnnnnnnnnnnnnnnnnnnnnnnnnnnnnnnnnnnnnnnnnnnnnnnnnnnnnnnnnnnnnnnnnnnnnnnnnnnnnnnnnnnnnnnnnnnnnnnnnnnnnnnnnnnnnnnnnnnnnnnnnnnnnnnnnnnnnnnnnnnnnnnnnnnnnnnnnnnnnnnnnnnnnnnnnnnnnnnnnnnnnnnnnnnnnnnnnnnnnnnnnnnnnnnnnnnnnnnnnnnnnnnnnnnnnnnnnnnnnnnnnnnnnnnnnnnnnnnnnnnnnnnnnnnnnnnnnnnnnnnnnnnnnnnnnnnnnnnnnnnnnnnnnnnnnnnnnnnnnnnnnnnnnnnnnnnnnnnnnnnnnnnnnnnnnnnnnnnnnnnnnnnnnnnnnnnnnnnnnnnnnnnnnnnnnnnnnnnnnnnnnnnnnnnnnnnnnnnnnnnnnnnnnnnnnnnnnnnnnnnnnnnnnnnnnnnnnnnnnnnnnnnnnnnnnnnnnnnnnnnnnnnnnnnnnnnnnnnnnnnnnnnnnnnnnnnnnnnnnnnnnnnnnnnnnnnnnnnnnnnnnnnnnnnnnnnnnnnnnnnnnnnnnnnnnnnnnnnnnnnnnnnnnnnnnnnnnnnnnnnnnnnnnnnnnnnnnnnnnnnnnnnnnnnnnnnnnnnnnnnnnnnnnnnnnnnnnnnnnnnnnnnnnnnnnnnnnnnnnnnnnnnnnnnnnnnnnnnnnnnnnnnnnnnnnnnnnnnnnnnnnnnnnnnnnnnnnnnnnnnnnnnnnnnnnnnnnnnnnnnnnnnnnnnnnnnnnnnnnnnnnnnnnnnnnnnnnnnnnnnnnnnnnnnnnnnnnnnnnnnnnnnnnnnnnnnnnnnnnnnnnnnnnnnnnnnnnnnnnnnnnnnnnnnnnnnnnnnnnnnnnnnnnnnnnnnnnnnnnnnnnnnnnnnnnnnnnnnnnnnnnnnnnnnnnnnnnnnnnnnnnnnnnnnnnnnnnnnnnnnnnnnnnnnnnnnnnnnnnnnnnnnnnnnnnnnnnnnnnnnnnnnnnnnnnnnnnnnnnnnnnnnnnnnnnnnnnnnnnnnnnnnnnnnnnnnnnnnnnnnnnnnnnnnnnnnnnnnnnnnnnnnnnnnnnnnnnnnnnnnnnnnnnnnnnnnnnnnnnnnnnnnnnnnnnnnnnnnnnnnnnnnnnnnnnnnnnnnnnnnnnnnnnnnnnnnnnnnnnnnnnnnnnnnnnnnnnnnnnnnnnnnnnnnnnnnnnnnnnnnnnnnnnnnnnnnnnnnnnnnnnnnnnnnnnnnnnnnnnnnnnnnnnnnnnnnnnnnnnnnnnnnnnnnnnnnnnnnnnnnnnnnnnnnnnnnnnnnnnnnnnnnnnnnnnnnnnnnnnnnnnnnnnnnnnnnnnnnnnnnnnnnnnnnnnnnnnnnnnnnnnnnnnnnnnnnnnnnnnnnnnnnnnnnnnnnnnnnnnnnnnnnnnnnnnnnnnnnnnnnnnnnnnnnnnnnnnnnnnnnnnnnnnnnnnnnnnnnnnnnnnnnnnnnnnnnnnnnnnnnnnnnnnnnnnnnnnnnnnnnnnnnnnnnnnnnnnnnnnnnnnnnnnnnnnnnnnnnnnnnnnnnnnnnnnnnnnnnnnnnnnnnnnnnnnnnnnnnnnnnnnnnnnnnnnnnnnnnnnnnnnnnnnnnnnnnnnnnnnnnnnnnnnnnnnnnnnnnnnnnnnnnnnnnnnnnnnnnnnnnnnnnnnnnnnnnnnnnnnnnnnnnnnnnnnnnnnnnnnnnnnnnnnnnnnnnnnnnnnnnnnnnnnnnnnnnnnnnnnnnnnnnnnnnnnnnnnnnnnnnnnnnnnnnnnnnnnnnnnnnnnnnnnnnnnnnnnnnnnnnnnnnnnnnnnnnnnnnnnnnnnnnnnnnnnnnnnnnnnnnnnnnnnnnnnnnnnnnnnnnnnnnnnnnnnnnnnnnnnnnnnnnnnnnnnnnnnnnnnnnnnnnnnnnnnnnnnnnnnnnnnnnnnnnnnnnnnnnnnnnnnnnnnnnnnnnnnnnnnnnnnnnnnnnnnnnnnnnnnnnnnnnnnnnnnnnnnnnnnnnnnnnnnnnnnnnnnnnnnnnnnnnnnnnnnnnnnnnnnnnnnnnnnnnnnnnnnnnnnnnnnnnnnnnnnnnnnnnnnnnnnnnnnnnnnnnnnnnnnnnnnnnnnnnnnnnnnnnnnnnnnnnnnnnnnnnnnnnnnnnnnnnnnnnnnnnnnnnnnnnnnnnnnnnnnnnnnnnnnnnnnnnnnnnnnnnnnnnnnnnnnnnnnnnnnnnnnnnnnnnnnnnnnnnnnnnnnnnnnnnnnnnnnnnnnnnnnnnnnnnnnnnnnnnnnnnnnnnnnnnnnnnnnnnnnnnnnnnnnnnnnnnnnnnnnnnnnnnnnnnnnnnnnnnnnnnnnnnnnnnnnnnnnnnnnnnnnnnnnnnnnnnnnnnnnnnnnnnnnnnnnnnnnnnnnnnnnnnnnnnnnnnnnnnnnnnnnnnnnnnnnnnnnnnnnnnnnnnnnnnnnnnnnnnnnnnnnnnnnnnnnnnnnnnnnnnnnnnnnnnnnnnnnnnnnnnnnnnnnnnnnnnnnnnnnnnnnnnnnnnnnnnnnnnnnnnnnnnnnnnnnnnnnnnnnnnnnnnnnnnnnnnnnnnnnnnnnnnnnnnnnnnnnnnnnnnnnnnnnnnnnnnnnnnnnnnnnnnnnnnnnnnnnnnnnnnnnnnnnnnnnnnnnnnnnnnnnnnnnnnnnnnnnnnnnnnnnnnnnnnnnnnnnnnnnnnnnnnnnnnnnnnnnnnnnnnnnnnnnnnnnnnnnnnnnnnnnnnnnnnnnnnnnnnnnnnnnnnnnnnnnnnnnnnnnnnnnnnnnnnnnnnnnnnnnnnnnnnnnnnnnnnnnnnnnnnnnnnnnnnnnnnnnnnnnnnnnnnnnnnnnnnnnnnnnnnnnnnnnnnnnnnnnnnnnnnnnnnnnnnnnnnnnnnnnnnnnnnnnnnnnnnnnnnnnnnnnnnnnnnnnnnnnnnnnnnnnnnnnnnnnnnnnnnnnnnnnnnnnnnnnnnnnnnnnnnnnnnnnnnnnnnnnnnnnnnnnnnnnnnnnnnnnnnnnnnnnnnnnnnnnnnnnnnnnnnnnnnnnnnnnnnnnnnnnnnnnnnnnnnnnnnnnnnnnnnnnnnnnnnnnnnnnnnnnnnnnnnnnnnnnnnnnnnnnnnnnnnnnnnnnnnnnnnnnnnnnnnnnnnnnnnnnnnnnnnnnnnnnnnnnnnnnnnnnnnnnnnnnnnnnnnnnnnnnnnnnnnnnnnnnnnnnnnnnnnnnnnnnnnnnnnnnnnnnnnnnnnnnnnnnnnnnnnnnnnnnnnnnnnnnnnnnnnnnnnnnnnnnnnnnnnnnnnnnnnnnnnnnnnnnnnnnnnnnnnnnnnnnnnnnnnnnnnnnnnnnnnnnnnnnnnnnnnnnnnnnnnnnnnnnnnnnnnnnnnnnnnnnnnnnnnnnnnnnnnnnnnnnnnnnnnnnnnnnnnnnnnnnnnnnnnnnnnnnnnnnnnnnnnnnnnnnnnnnnnnnnnnnnnnnnnnnnnnnnnnnnnnnnnnnnnnnnnnnnnnnnnnnnnnnnnnnnnnnnnnnnnnnnnnnnnnnnnnnnnnnnnnnnnnnnnnnnnnnnnnnnnnnnnnnnnnnnnnnnnnnnnnnnnnnnnnnnnnnnnnnnnnnnnnnnnnnnnnnnnnnnnnnnnnnnnnnnnnnnnnnnnnnnnnnnnnnnnnnnnnnnnnnnnnnnnnnnnnnnnnnnnnnnnnnnnnnnnnnnnnnnnnnnnnnnnnnnnnnnnnnnnnnnnnnnnnnnnnnnnnnnnnnnnnnnnnnnnnnnnnnnnnnnnnnnnnnnnnnnnnnnnnnnnnnnnnnnnnnnnnnnnnnnnnnnnnnnnnnnnnnnnnnnnnnnnnnnnnnnnnnnnnnnnnnnnnnnnnnnnnnnnnnnnnnnnnnnnnnnnnnnnnnnnnnnnnnnnnnnnnnnnnnnnnnnnnnnnnnnnnnnnnnnnnnnnnnnnnnnnnnnnnnnnnnnnnnnnnnnnnnnnnnnnnnnnnnnnnnnnnnnnnnnnnnnnnnnnnnnnnnnnnnnnnnnnnnnnnnnnnnnnnnnnnnnnnnnnnnnnnnnnnnnnnnnnnnnnnnnnnnnnnnnnnnnnnnnnnnnnnnnnnnnnnnnnnnnnnnnnnnnnnnnnnnnnnnnnnnnnnnnnnnnnnnnnnnnnnnnnnnnnnnnnnnnnnnnnnnnnnnnnnnnnnnnnnnnnnnnnnnnnnnnnnnnnnnnnnnnnnnnnnnnnnnnnnnnnnnnnnnnnnnnnnnnnnnnnnnnnnnnnnnnnnnnnnnnnnnnnnnnnnnnnnnnnnnnnnnnnnnnnnnnnnnnnnnnnnnnnnnnnnnnnnnnnnnnnnnnnnnnnnnnnnnnnnnnnnnnnnnnnnnnnnnnnnnnnnnnnnnnnnnnnnnnnnnnnnnnnnnnnnnnnnnnnnnnnnnnnnnnnnnnnnnnnnnnnnnnnnnnnnnnnnnnnnnnnnnnnnnnnnnnnnnnnnnnnnnnnnnnnnnnnnnnnnnnnnnnnnnnnnnnnnnnnnnnnnnnnnnnnnnnnnnnnnnnnnnnnnnnnnnnnnnnnnnnnnnnnnnnnnnnnnnnnnnnnnnnnnnnnnnnnnnnnnnnnnnnnnnnnnnnnnnnnnnnnnnnnnnnnnnnnnnnnnnnnnnnnnnnnnnnnnnnnnnnnnnnnnnnnnnnnnnnnnnnnnnnnnnnnnnnnnnnnnnnnnnnnnnnnnnnnnnnnnnnnnnnnnnnnnnnnnnnnnnnnnnnnnnnnnnnnnnnnnnnnnnnnnnnnnnnnnnnnnnnnnnnnnnnnnnnnnnnnnnnnnnnnnnnnnnnnnnnnnnnnnnnnnnnnnnnnnnnnnnnnnnnnnnnnnnnnnnnnnnnnnnnnnnnnnnnnnnnnnnnnnnnnnnnnnnnnnnnnnnnnnnnnnnnnnnnnnnnnnnnnnnnnnnnnnnnnnnnnnnnnnnnnnnnnnnnnnnnnnnnnnnnnnnnnnnnnnnnnnnnnnnnnnnnnnnnnnnnnnnnnnnnnnnnnnnnnnnnnnnnnnnnnnnnnnnnnnnnnnnnnnnnnnnnnnnnnnnnnnnnnnnnnnnnnnnnnnnnnnnnnnnnnnnnnnnnnnnnnnnnnnnnnnnnnnnnnnnnnnnnnnnnnnnnnnnnnnnnnnnnnnnnnnnnnnnnnnnnnnnnnnnnnnnnnnnnnnnnnnnnnnnnnnnnnnnnnnnnnnnnnnnnnnnnnnnnnnnnnnnnnnnnnnnnnnnnnnnnnnnnnnnnnnnnnnnnnnnnnnnnnnnnnnnnnnnnnnnnnnnnnnnnnnnnnnnnnnnnnnnnnnnnnnnnnnnnnnnnnnnnnnnnnnnnnnnnnnnnnnnnnnnnnnnnnnnnnnnnnnnnnnnnnnnnnnnnnnnnnnnnnnnnnnnnnnnnnnnnnnnnnnnnnnnnnnnnnnnnnnnnnnnnnnnnnnnnnnnnnnnnnnnnnnnnnnnnnnnnnnnnnnnnnnnnnnnnnnnnnnnnnnnnnnnnnnnnnnnnnnnnnnnnnnnnnnnnnnnnnnnnnnnnnnnnnnnnnnnnnnnnnnnnnnnnnnnnnnnnnnnnnnnnnnnnnnnnnnnnnnnnnnnnnnnnnnnnnnnnnnnnnnnnnnnnnnnnnnnnnnnnnnnnnnnnnnnnnnnnnnnnnnnnnnnnnnnnnnnnnnnnnnnnnnnnnnnnnnnnnnnnnnnnnnnnnnnnnnnnnnnnnnnnnnnnnnnnnnnnnnnnnnnnnnnnnnnnnnnnnnnnnnnnnnnnnnnnnnnnnnnnnnnnnnnnnnnnnnnnnnnnnnnnnnnnnnnnnnnnnnnnnnnnnnnnnnnnnnnnnnnnnnnnnnnnnnnnnnnnnnnnnnnnnnnnnnnnnnnnnnnnnnnnnnnnnnnnnnnnnnnnnnnnnnnnnnnnnnnnnnnnnnnnnnnnnnnnnnnnnnnnnnnnnnnnnnnnnnnnnnnnnnnnnnnnnnnnnnnnnnnnnnnnnnnnnnnnnnnnnnnnnnnnnnnnnnnnnnnnnnnnnnnnnnnnnnnnnnnnnnnnnnnnnnnnnnnnnnnnnnnnnnnnnnnnnnnnnnnnnnnnnnnnnnnnnnnnnnnnnnnnnnnnnnnnnnnnnnnnnnnnnnnnnnnnnnnnnnnnnnnnnnnnnnnnnnnnnnnnnnnnnnnnnnnnnnnnnnnnnnnnnnnnnnnnnnnnnnnnnnnnnnnnnnnnnnnnnnnnnnnnnnnnnnnnnnnnnnnnnnnnnnnnnnnnnnnnnnnnnnnnnnnnnnnnnnnnnnnnnnnnnnnnnnnnnnnnnnnnnnnnnnnnnnnnnnnnnnnnnnnnnnnnnnnnnnnnnnnnnnnnnnnnnnnnnnnnnnnnnnnnnnnnnnnnnnnnnnnnnnnnnnnnnnnnnnnnnnnnnnnnnnnnnnnnnnnnnnnnnnnnnnnnnnnnnnnnnnnnnnnnnnnnnnnnnnnnnnnnnnnnnnnnnnnnnnnnnnnnnnnnnnnnnnnnnnnnnnnnnnnnnnnnnnnnnnnnnnnnnnnnnnnnnnnnnnnnnnnnnnnnnnnnnnnnnnnnnnnnnnnnnnnnnnnnnnnnnnnnnnnnnnnnnnnnnnnnnnnnnnnnnnnnnnnnnnnnnnnnnnnnnnnnnnnnnnnnnnnnnnnnnnnnnnnnnnnnnnnnnnnnnnnnnnnnnnnnnnnnnnnnnnnnnnnnnnnnnnnnnnnnnnnnnnnnnnnnnnnnnnnnnnnnnnnnnnnnnnnnnnnnnnnnnnnnnnnnnnnnnnnnnnnnnnnnnnnnnnnnnnnnnnnnnnnnnnnnnnnnnnnnnnnnnnnnnnnnnnnnnnnnnnnnnnnnnnnnnnnnnnnnnnnnnnnnnnnnnnnnnnnnnnnnnnnnnnnnnnnnnnnnnnnnnnnnnnnnnnnnnnnnnnnnnnnnnnnnnnnnnnnnnnnnnnnnnnnnnnnnnnnnnnnnnnnnnnnnnnnnnnnnnnnnnnnnnnnnnnnnnnnnnnnnnnnnnnnnnnnnnnnnnnnnnnnnnnnnnnnnnnnnnnnnnnnnnnnnnnnnnnnnnnnnnnnnnnnnnnnnnnnnnnnnnnnnnnnnnnnnnnnnnnnnnnnnnnnnnnnnnnnnnnnnnnnnnnnnnnnnnnnnnnnnnnnnnnnnnnnnnnnnnnnnnnnnnnnnnnnnnnnnnnnnnnnnnnnnnnnnnnnnnnnnnnnnnnnnnnnnnnnnnnnnnnnnnnnnnnnnnnnnnnnnnnnnnnnnnnnnnnnnnnnnnnnnnnnnnnnnnnnnnnnnnnnnnnnnnnnnnnnnnnnnnnnnnnnnnnnnnnnnnnnnnnnnnnnnnnnnnnnnnnnnnnnnnnnnnnnnnnnnnnnnnnnnnnnnnnnnnnnnnnnnnnnnnnnnnnnnnnnnnnnnnnnnnnnnnnnnnnnnnnnnnnnnnnnnnnnnnnnnnnnnnnnnnnnnnnnnnnnnnnnnnnnnnnnnnnnnnnnnnnnnnnnnnnnnnnnnnnnnnnnnnnnnnnnnnnnnnnnnnnnnnnnnnnnnnnnnnnnnnnnnnnnnnnnnnnnnnnnnnnnnnnnnnnnnnnnnnnnnnnnnnnnnnnnnnnnnnnnnnnnnnnnnnnnnnnnnnnnnnnnnnnnnnnnnnnnnnnnnnnnnnnnnnnnnnnnnnnnnnnnnnnnnnnnnnnnnnnnnnnnnnnnnnnnnnnnnnnnnnnnnnnnnnnnnnnnnnnnnnnnnnnnnnnnnnnnnnnnnnnnnnnnnnnnnnnnnnnnnnnnnnnnnnnnnnnnnnnnnnnnnnnnnnnnnnnnnnnnnnnnnnnnnnnnnnnnnnnnnnnnnnnnnnnnnnnnnnnnnnnnnnnnnnnnnnnnnnnnnnnnnnnnnnnnnnnnnnnnnnnnnnnnnnnnnnnnnnnnnnnnnnnnnnnnnnnnnnnnnnnnnnnnnnnnnnnnnnnnnnnnnnnnnnnnnnnnnnnnnnnnnnnnnnnnnnnnnnnnnnnnnnnnnnnnnnnnnnnnnnnnnnnnnnnnnnnnnnnnnnnnnnnnnnnnnnnnnnnnnnnnnnnnnnnnnnnnnnnnnnnnnnnnnnnnnnnnnnnnnnnnnnnnnnnnnnnnnnnnnnnnnnnnnnnnnnnnnnnnnnnnnnnnnnnnnnnnnnnnnnnnnnnnnnnnnnnnnnnnnnnnnnnnnnnnnnnnnnnnnnnnnnnnnnnnnnnnnnnnnnnnnnnnnnnnnnnnnnnnnnnnnnnnnnnnnnnnnnnnnnnnnnnnnnnnnnnnnnnnnnnnnnnnnnnnnnnnnnnnnnnnnnnnnnnnnnnnnnnnnnnnnnnnnnnnnnnnnnnnnnnnnnnnnnnnnnnnnnnnnnnnnnnnnnnnnnnnnnnnnnnnnnnnnnnnnnnnnnnnnnnnnnnnnnnnnnnnnnnnnnnnnnnnnnnnnnnnnnnnnnnnnnnnnnnnnnnnnnnnnnnnnnnnnnnnnnnnnnnnnnnnnnnnnnnnnnnnnnnnnnnnnnnnnnnnnnnnnnnnnnnnnnnnnnnnnnnnnnnnnnnnnnnnnnnnnnnnnnnnnnnnnnnnnnnnnnnnnnnnnnnnnnnnnnnnnnnnnnnnnnnnnnnnnnnnnnnnnnnnnnnnnnnnnnnnnnnnnnnnnnnnnnnnnnnnnnnnnnnnnnnnnnnnnnnnnnnnnnnnnnnnnnnnnnnnnnnnnnnnnnnnnnnnnnnnnnnnnnnnnnnnnnnnnnnnnnnnnnnnnnnnnnnnnnnnnnnnnnnnnnnnnnnnnnnnnnnnnnnnnnnnnnnnnnnnnnnnnnnnnnnnnnnnnnnnnnnnnnnnnnnnnnnnnnnnnnnnnnnnnnnnnnnnnnnnnnnnnnnnnnnnnnnnnnnnnnnnnnnnnnnnnnnnnnnnnnnnnnnnnnnnnnnnnnnnnnnnnnnnnnnnnnnnnnnnnnnnnnnnnnnnnnnnnnnnnnnnnnnnnnnnnnnnnnnnnnnnnnnnnnnnnnnnnnnnnnnnnnnnnnnnnnnnnnnnnnnnnnnnnnnnnnnnnnnnnnnnnnnnnnnnnnnnnnnnnnnnnnnnnnnnnnnnnnnnnnnnnnnnnnnnnnnnnnnnnnnnnnnnnnnnnnnnnnnnnnnnnnnnnnnnnnnnnnnnnnnnnnnnnnnnnnnnnnnnnnnnnnnnnnnnnnnnnnnnnnnnnnnnnnnnnnnnnnnnnnnnnnnnnnnnnnnnnnnnnnnnnnnnnnnnnnnnnnnnnnnnnnnnnnnnnnnnnnnnnnnnnnnnnnnnnnnnnnnnnnnnnnnnnnnnnnnnnnnnnnnnnnnnnnnnnnnnnnnnnnnnnnnnnnnnnnnnnnnnnnnnnnnnnnnnnnnnnnnnnnnnnnnnnnnnnnnnnnnnnnnnnnnnnnnnnnnnnnnnnnnnnnnnnnnnnnnnnnnnnnnnnnnnnnnnnnnnnnnnnnnnnnnnnnnnnnnnnnnnnnnnnnnnnnnnnnnnnnnnnnnnnnnnnnnnnnnnnnnnnnnnnnnnnnnnnnnnnnnnnnnnnnnnnnnnnnnnnnnnnnnnnnnnnnnnnnnnnnnnnnnnnnnnnnnnnnnnnnnnnnnnnnnnnnnnnnnnnnnnnnnnnnnnnnnnnnnnnnnnnnnnnnnnnnnnnnnnnnnnnnnnnnnnnnnnnnnnnnnnnnnnnnnnnnnnnnnnnnnnnnnnnnnnnnnnnnnnnnnnnnnnnnnnnnnnnnnnnnnnnnnnnnnnnnnnnnnnnnnnnnnnnnnnnnnnnnnnnnnnnnnnnnnnnnnnnnnnnnnnnnnnnnnnnnnnnnnnnnnnnnnnnnnnnnnnnnnnnnnnnnnnnnnnnnnnnnnnnnnnnnnnnnnnnnnnnnnnnnnnnnnnnnnnnnnnnnnnnnnnnnnnnnnnnnnnnnnnnnnnnnnnnnnnnnnnnnnnnnnnnnnnnnnnnnnnnnnnnnnnnnnnnnnnnnnnnnnnnnnnnnnnnnnnnnnnnnnnnnnnnnnnnnnnnnnnnnnnnnnnnnnnnnnnnnnnnnnnnnnnnnnnnnnnnnnnnnnnnnnnnnnnnnnnnnnnnnnnnnnnnnnnnnnnnnnnnnnnnnnnnnnnnnnnnnnnnnnnnnnnnnnnnnnnnnnnnnnnnnnnnnnnnnnnnnnnnnnnnnnnnnnnnnnnnnnnnnnnnnnnnnnnnnnnnnnnnnnnnnnnnnnnnnnnnnnnnnnnnnnnnnnnnnnnnnnnnnnnnnnnnnnnnnnnnnnnnnnnnnnnnnnnnnnnnnnnnnnnnnnnnnnnnnnnnnnnnnnnnnnnnnnnnnnnnnnnnnnnnnnnnnnnnnnnnnnnnnnnnnnnnnnnnnnnnnnnnnnnnnnnnnnnnnnnnnnnnnnnnnnnnnnnnnnnnnnnnnnnnnnnnnnnnnnnnnnnnnnnnnnnnnnnnnnnnnnnnnnnnnnnnnnnnnnnnnnnnnnnnnnnnnnnnnnnnnnnnnnnnnnnnnnnnnnnnnnnnnnnnnnnnnnnnnnnnnnnnnnnnnnnnnnnnnnnnnnnnnnnnnnnnnnnnnnnnnnnnnnnnnnnnnnnnnnnnnnnnnnnnnnnnnnnnnnnnnnnnnnnnnnnnnnnnnnnnnnnnnnnnnnnnnnnnnnnnnnnnnnnnnnnnnnnnnnnnnnnnnnnnnnnnnnnnnnnnnnnnnnnnnnnnnnnnnnnnnnnnnnnnnnnnnnnnnnnnnnnnnnnnnnnnnnnnnnnnnnnnnnnnnnnnnnnnnnnnnnnnnnnnnnnnnnnnnnnnnnnnnnnnnnnnnnnnnnnnnnnnnnnnnnnnnnnnnnnnnnnnnnnnnnnnnnnnnnnnnnnnnnnnnnnnnnnnnnnnnnnnnnnnnnnnnnnnnnnnnnnnnnnnnnnnnnnnnnnnnnnnnnnnnnnnnnnnnnnnnnnnnnnnnnnnnnnnnnnnnnnnnnnnnnnnnnnnnnnnnnnnnnnnnnnnnnnnnnnnnnnnnnnnnnnnnnnnnnnnnnnnnnnnnnnnnnnnnnnnnnnnnnnnnnnnnnnnnnnnnnnnnnnnnnnnnnnnnnnnnnnnnnnnnnnnnnnnnnnnnnnnnnnnnnnnnnnnnnnnnnnnnnnnnnnnnnnnnnnnnnnnnnnnnnnnnnnnnnnnnnnnnnnnnnnnnnnnnnnnnnnnnnnnnnnnnnnnnnnnnnnnnnnnnnnnnnnnnnnnnnnnnnnnnnnnnnnnnnnnnnnnnnnnnnnnnnnnnnnnnnnnnnnnnnnnnnnnnnnnnnnnnnnnnnnnnnnnnnnnnnnnnnnnnnnnnnnnnnnnnnnnnnnnnnnnnnnnnnnnnnnnnnnnnnnnnnnnnnnnnnnnnnnnnnnnnnnnnnnnnnnnnnnnnnnnnnnnnnnnnnnnnnnnnnnnnnnnnnnnnnnnnnnnnnnnnnnnnnnnnnnnnnnnnnnnnnnnnnnnnnnnnnnnnnnnnnnnnnnnnnnnnnnnnnnnnnnnnnnnnnnnnnnnnnnnnnnnnnnnnnnnnnnnnnnnnnnnnnnnnnnnnnnnnnnnnnnnnnnnnnnnnnnnnnnnnnnnnnnnnnnnnnnnnnnnnnnnnnnnnnnnnnnnnnnnnnnnnnnnnnnnnnnnnnnnnnnnnnnnnnnnnnnnnnnnnnnnnnnnnnnnnnnnnnnnnnnnnnnnnnnnnnnnnnnnnnnnnnnnnnnnnnnnnnnnnnnnnnnnnnnnnnnnnnnnnnnnnnnnnnnnnnnnnnnnnnnnnnnnnnnnnnnnnnnnnnnnnnnnnnnnnnnnnnnnnnnnnnnnnnnnnnnnnnnnnnnnnnnnnnnnnnnnnnnnnnnnnnnnnnnnnnnnnnnnnnnnnnnnnnnnnnnnnnnnnnnnnnnnnnnnnnnnnnnnnnnnnnnnnnnnnnnnnnnnnnnnnnnnnnnnnnnnnnnnnnnnnnnnnnnnnnnnnnnnnnnnnnnnnnnnnnnnnnnnnnnnnnnnnnnnnnnnnnnnnnnnnnnnnnnnnnnnnnnnnnnnnnnnnnnnnnnnnnnnnnnnnnnnnnnnnnnnnnnnnnnnnnnnnnnnnnnnnnnnnnnnnnnnnnnnnnnnnnnnnnnnnnnnnnnnnnnnnnnnnnnnnnnnnnnnnnnnnnnnnnnnnnnnnnnnnnnnnnnnnnnnnnnnnnnnnnnnnnnnnnnnnnnnnnnnnnnnnnnnnnnnnnnnnnnnnnnnnnnnnnnnnnnnnnnnnnnnnnnnnnnnnnnnnnnnnnnnnnnnnnnnnnnnnnnnnnnnnnnnnnnnnnnnnnnnnnnnnnnnnnnnnnnnnnnnnnnnnnnnnnnnnnnnnnnnnnnnnnnnnnnnnnnnnnnnnnnnnnnnnnnnnnnnnnnnnnnnnnnnnnnnnnnnnnnnnnnnnnnnnnnnnnnnnnnnnnnnnnnnnnnnnnnnnnnnnnnnnnnnnnnnnnnnnnnnnnnnnnnnnnnnnnnnnnnnnnnnnnnnnnnnnnnnnnnnnnnnnnnnnnnnnnnnnnnnnnnnnnnnnnnnnnnnnnnnnnnnnnnnnnnnnnnnnnnnnnnnnnnnnnnnnnnnnnnnnnnnnnnnnnnnnnnnnnnnnnnnnnnnnnnnnnnnnnnnnnnnnnnnnnnnnnnnnnnnnnnnnnnnnnnnnnnnnnnnnnnnnnnnnnnnnnnnnnnnnnnnnnnnnnnnnnnnnnnnnnnnnnnnnnnnnnnnnnnnnnnnnnnnnnnnnnnnnnnnnnnnnnnnnnnnnnnnnnnnnnnnnnnnnnnnnnnnnnnnnnnnnnnnnnnnnnnnnnnnnnnnnnnnnnnnnnnnnnnnnnnnnnnnnnnnnnnnnnnnnnnnnnnnnnnnnnnnnnnnnnnnnnnnnnnnnnnnnnnnnnnnnnnnnnnnnnnnnnnnnnnnnnnnnnnnnnnnnnnnnnnnnnnnnnnnnnnnnnnnnnnnnnnnnnnnnnnnnnnnnnnnnnnnnnnnnnnnnnnnnnnnnnnnnnnnnnnnnnnnnnnnnnnnnnnnnnnnnnnnnnnnnnnnnnnnnnnnnnnnnnnnnnnnnnnnnnnnnnnnnnnnnnnnnnnnnnnnnnnnnnnnnnnnnnnnnnnnnnnnnnnnnnnnnnnnnnnnnnnnnnnnnnnnnnnnnnnnnnnnnnnnnnnnnnnnnnnnnnnnnnnnnnnnnnnnnnnnnnnnnnnnnnnnnnnnnnnnnnnnnnnnnnnnnnnnnnnnnnnnnnnnnnnnnnnnnnnnnnnnnnnnnnnnnnnnnnnnnnnnnnnnnnnnnnnnnnnnnnnnnnnnnnnnnnnnnnnnnnnnnnnnnnnnnnnnnnnnnnnnnnnnnnnnnnnnnnnnnnnnnnnnnnnnnnnnnnnnnnnnnnnnnnnnnnnnnnnnnnnnnnnnnnnnnnnnnnnnnnnnnnnnnnnnnnnnnnnnnnnnnnnnnnnnnnnnnnnnnnnnnnnnnnnnnnnnnnnnnnnnnnnnnnnnnnnnnnnnnnnnnnnnnnnnnnnnnnnnnnnnnnnnnnnnnnnnnnnnnnnnnnnnnnnnnnnnnnnnnnnnnnnnnnnnnnnnnnnnnnnnnnnnnnnnnnnnnnnnnnnnnnnnnnnnnnnnnnnnnnnnnnnnnnnnnnnnnnnnnnnnnnnnnnnnnnnnnnnnnnnnnnnnnnnnnnnnnnnnnnnnnnnnnnnnnnnnnnnnnnnnnnnnnnnnnnnnnnnnnnnnnnnnnnnnnnnnnnnnnnnnnnnnnnnnnnnnnnnnnnnnnnnnnnnnnnnnnnnnnnnnnnnnnnnnnnnnnnnnnnnnnnnnnnnnnnnnnnnnnnnnnnnnnnnnnnnnnnnnnnnnnnnnnnnnnnnnnnnnnnnnnnnnnnnnnnnnnnnnnnnnnnnnnnnnnnnnnnnnnnnnnnnnnnnnnnnnnnnnnnnnnnnnnnnnnnnnnnnnnnnnnnnnnnnnnnnnnnnnnnnnnnnnnnnnnnnnnnnnnnnnnnnnnnnnnnnnnnnnnnnnnnnnnnnnnnnnnnnnnnnnnnnnnnnnnnnnnnnnnnnnnnnnnnnnnnnnnnnnnnnnnnnnnnnnnnnnnnnnnnnnnnnnnnnnnnnnnnnnnnnnnnnnnnnnnnnnnnnnnnnnnnnnnnnnnnnnnnnnnnnnnnnnnnnnnnnnnnnnnnnnnnnnnnnnnnnnnnnnnnnnnnnnnnnnnnnnnnnnnnnnnnnnnnnnnnnnnnnnnnnnnnnnnnnnnnnnnnnnnnnnnnnnnnnnnnnnnnnnnnnnnnnnnnnnnnnnnnnnnnnnnnnnnnnnnnnnnnnnnnnnnnnnnnnnnnnnnnnnnnnnnnnnnnnnnnnnnnnnnnnnnnnnnnnnnnnnnnnnnnnnnnnnnnnnnnnnnnnnnnnnnnnnnnnnnnnnnnnnnnnnnnnnnnnnnnnnnnnnnnnnnnnnnnnnnnnnnnnnnnnnnnnnnnnnnnnnnnnnnnnnnnnnnnnnnnnnnnnnnnnnnnnnnnnnnnnnnnnnnnnnnnnnnnnnnnnnnnnnnnnnnnnnnnnnnnnnnnnnnnnnnnnnnnnnnnnnnnnnnnnnnnnnnnnnnnnnnnnnnnnnnnnnnnnnnnnnnnnnnnnnnnnnnnnnnnnnnnnnnnnnnnnnnnnnnnnnnnnnnnnnnnnnnnnnnnnnnnnnnnnnnnnnnnnnnnnnnnnnnnnnnnnnnnnnnnnnnnnnnnnnnnnnnnnnnnnnnnnnnnnnnnnnnnnnnnnnnnnnnnnnnnnnnnnnnnnnnnnnnnnnnnnnnnnnnnnnnnnnnnnnnnnnnnnnnnnnnnnnnnnnnnnnnnnnnnnnnnnnnnnnnnnnnnnnnnnnnnnnnnnnnnnnnnnnnnnnnnnnnnnnnnnnnnnnnnnnnnnnnnnnnnnnnnnnnnnnnnnnnnnnnnnnnnnnnnnnnnnnnnnnnnnnnnnnnnnnnnnnnnnnnnnnnnnnnnnnnnnnnnnnnnnnnnnnnnnnnnnnnnnnnnnnnnnnnnnnnnnnnnnnnnnnnnnnnnnnnnnnnnnnnnnnnnnnnnnnnnnnnnnnnnnnnnnnnnnnnnnnnnnnnnnnnnnnnnnnnnnnnnnnnnnnnnnnnnnnnnnnnnnnnnnnnnnnnnnnnnnnnnnnnnnnnnnnnnnnnnnnnnnnnnnnnnnnnnnnnnnnnnnnnnnnnnnnnnnnnnnnnnnnnnnnnnnnnnnnnnnnnnnnnnnnnnnnnnnnnnnnnnnnnnnnnnnnnnnnnnnnnnnnnnnnnnnnnnnnnnnnnnnnnnnnnnnnnnnnnnnnnnnnnnnnnnnnnnnnnnnnnnnnnnnnnnnnnnnnnnnnnnnnnnnnnnnnnnnnnnnnnnnnnnnnnnnnnnnnnnnnnnnnnnnnnnnnnnnnnnnnnnnnnnnnnnnnnnnnnnnnnnnnnnnnnnnnnnnnnnnnnnnnnnnnnnnnnnnnnnnnnnnnnnnnnnnnnnnnnnnnnnnnnnnnnnnnnnnnnnnnnnnnnnnnnnnnnnnnnnnnnnnnnnnnnnnnnnnnnnnnnnnnnnnnnnnnnnnnnnnnnnnnnnnnnnnnnnnnnnnnnnnnnnnnnnnnnnnnnnnnnnnnnnnnnnnnnnnnnnnnnnnnnnnnnnnnnnnnnnnnnnnnnnnnnnnnnnnnnnnnnnnnnnnnnnnnnnnnnnnnnnnnnnnnnnnnnnnnnnnnnnnnnnnnnnnnnnnnnnnnnnnnnnnnnnnnnnnnnnnnnnnnnnnnnnnnnnnnnnnnnnnnnnnnnnnnnnnnnnnnnnnnnnnnnnnnnnnnnnnnnnnnnnnnnnnnnnnnnnnnnnnnnnnnnnnnnnnnnnnnnnnnnnnnnnnnnnnnnnnnnnnnnnnnnnnnnnnnnnnnnnnnnnnnnnnnnnnnnnnnnnnnnnnnnnnnnnnnnnnnnnnnnnnnnnnnnnnnnnnnnnnnnnnnnnnnnnnnnnnnnnnnnnnnnnnnnnnnnnnnnnnnnnnnnnnnnnnnnnnnnnnnnnnnnnnnnnnnnnnnnnnnnnnnnnnnnnnnnnnnnnnnnnnnnnnnnnnnnnnnnnnnnnnnnnnnnnnnnnnnnnnnnnnnnnnnnnnnnnnnnnnnnnnnnnnnnnnnnnnnnnnnnnnnnnnnnnnnnnnnnnnnnnnnnnnnnnnnnnnnnnnnnnnnnnnnnnnnnnnnnnnnnnnnnnnnnnnnnnnnnnnnnnnnnnnnnnnnnnnnnnnnnnnnnnnnnnnnnnnnnnnnnnnnnnnnnnnnnnnnnnnnnnnnnnnnnnnnnnnnnnnnnnnnnnnnnnnnnnnnnnnnnnnnnnnnnnnnnnnnnnnnnnnnnnnnnnnnnnnnnnnnnnnnnnnnnnnnnnnnnnnnnnnnnnnnnnnnnnnnnnnnnnnnnnnnnnnnnnnnnnnnnnnnnnnnnnnnnnnnnnnnnnnnnnnnnnnnnnnnnnnnnnnnnnnnnnnnnnnnnnnnnnnnnnnnnnnnnnnnnnnnnnnnnnnnnnnnnnnnnnnnnnnnnnnnnnnnnnnnnnnnnnnnnnnnnnnnnnnnnnnnnnnnnnnnnnnnnnnnnnnnnnnnnnnnnnnnnnnnnnnnnnnnnnnnnnnnnnnnnnnnnnnnnnnnnnnnnnnnnnnnnnnnnnnnnnnnnnnnnnnnnnnnnnnnnnnnnnnnnnnnnnnnnnnnnnnnnnnnnnnnnnnnnnnnnnnnnnnnnnnnnnnnnnnnnnnnnnnnnnnnnnnnnnnnnnnnnnnnnnnnnnnnnnnnnnnnnnnnnnnnnnnnnnnnnnnnnnnnnnnnnnnnnnnnnnnnnnnnnnnnnnnnnnnnnnnnnnnnnnnnnnnnnnnnnnnnnnnnnnnnnnnnnnnnnnnnnnnnnnnnnnnnnnnnnnnnnnnnnnnnnnnnnnnnnnnnnnnnnnnnnnnnnnnnnnnnnnnnnnnnnnnnnnnnnnnnnnnnnnnnnnnnnnnnnnnnnnnnnnnnnnnnnnnnnnnnnnnnnnnnnnnnnnnnnnnnnnnnnnnnnnnnnnnnnnnnnnnnnnnnnnnnnnnnnnnnnnnnnnnnnnnnnnnnnnnnnnnnnnnnnnnnnnnnnnnnnnnnnnnnnnnnnnnnnnnnnnnnnnnnnnnnnnnnnnnnnnnnnnnnnnnnnnnnnnnnnnnnnnnnnnnnnnnnnnnnnnnnnnnnnnnnnnnnnnnnnnnnnnnnnnnnnnnnnnnnnnnnnnnnnnnnnnnnnnnnnnnnnnnnnnnnnnnnnnnnnnnnnnnnnnnnnnnnnnnnnnnnnnnnnnnnnnnnnnnnnnnnnnnnnnnnnnnnnnnnnnnnnnnnnnnnnnnnnnnnnnnnnnnnnnnnnnnnnnnnnnnnnnnnnnnnnnnnnnnnnnnnnnnnnnnnnnnnnnnnnnnnnnnnnnnnnnnnnnnnnnnnnnnnnnnnnnnnnnnnnnnnnnnnnnnnnnnnnnnnnnnnnnnnnnnnnnnnnnnnnnnnnnnnnnnnnnnnnnnnnnnnnnnnnnnnnnnnnnnnnnnnnnnnnnnnnnnnnnnnnnnnnnnnnnnnnnnnnnnnnnnnnnnnnnnnnnnnnnnnnnnnnnnnnnnnnnnnnnnnnnnnnnnnnnnnnnnnnnnnnnnnnnnnnnnnnnnnnnnnnnnnnnnnnnnnnnnnnnnnnnnnnnnnnnnnnnnnnnnnnnnnnnnnnnnnnnnnnnnnnnnnnnnnnnnnnnnnnnnnnnnnnnnnnnnnnnnnnnnnnnnnnnnnnnnnnnnnnnnnnnnnnnnnnnnnnnnnnnnnnnnnnnnnnnnnnnnnnnnnnnnnnnnnnnnnnnnnnnnnnnnnnnnnnnnnnnnnnnnnnnnnnnnnnnnnnnnnnnnnnnnnnnnnnnnnnnnnnnnnnnnnnnnnnnnnnnnnnnnnnnnnnnnnnnnnnnnnnnnnnnnnnnnnnnnnnnnnnnnnnnnnnnnnnnnnnnnnnnnnnnnnnnnnnnnnnnnnnnnnnnnnnnnnnnnnnnnnnnnnnnnnnnnnnnnnnnnnnnnnnnnnnnnnnnnnnnnnnnnnnnnnnnnnnnnnnnnnnnnnnnnnnnnnnnnnnnnnnnnnnnnnnnnnnnnnnnnnnnnnnnnnnnnnnnnnnnnnnnnnnnnnnnnnnnnnnnnnnnnnnnnnnnnnnnnnnnnnnnnnnnnnnnnnnnnnnnnnnnnnnnnnnnnnnnnnnnnnnnnnnnnnnnnnnnnnnnnnnnnnnnnnnnnnnnnnnnnnnnnnnnnnnnnnnnnnnnnnnnnnnnnnnnnnnnnnnnnnnnnnnnnnnnnnnnnnnnnnnnnnnnnnnnnnnnnnnnnnnnnnnnnnnnnnnnnnnnnnnnnnnnnnnnnnnnnnnnnnnnnnnnnnnnnnnnnnnnnnnnnnnnnnnnnnnnnnnnnnnnnnnnnnnnnnnnnnnnnnnnnnnnnnnnnnnnnnnnnnnnnnnnnnnnnnnnnnnnnnnnnnnnnnnnnnnnnnnnnnnnnnnnnnnnnnnnnnnnnnnnnnnnnnnnnnnnnnnnnnnnnnnnnnnnnnnnnnnnnnnnnnnnnnnnnnnnnnnnnnnnnnnnnnnnnnnnnnnnnnnnnnnnnnnnnnnnnnnnnnnnnnnnnnnnnnnnnnnnnnnnnnnnnnnnnnnnnnnnnnnnnnnnnnnnnnnnnnnnnnnnnnnnnnnnnnnnnnnnnnnnnnnnnnnnnnnnnnnnnnnnnnnnnnnnnnnnnnnnnnnnnnnnnnnnnnnnnnnnnnnnnnnnnnnnnnnnnnnnnnnnnnnnnnnnnnnnnnnnnnnnnnnnnnnnnnnnnnnnnnnnnnnnnnnnnnnnnnnnnnnnnnnnnnnnnnnnnnnnnnnnnnnnnnnnnnnnnnnnnnnnnnnnnnnnnnnnnnnnnnnnnnnnnnnnnnnnnnnnnnnnnnnnnnnnnnnnnnnnnnnnnnnnnnnnnnnnnnnnnnnnnnnnnnnnnnnnnnnnnnnnnnnnnnnnnnnnnnnnnnnnnnnnnnnnnnnnnnnnnnnnnnnnnnnnnnnnnnnnnnnnnnnnnnnnnnnnnnnnnnnnnnnnnnnnnnnnnnnnnnnnnnnnnnnnnnnnnnnnnnnnnnnnnnnnnnnnnnnnnnnnnnnnnnnnnnnnnnnnnnnnnnnnnnnnnnnnnnnnnnnnnnnnnnnnnnnnnnnnnnnnnnnnnnnnnnnnnnnnnnnnnnnnnnnnnnnnnnnnnnnnnnnnnnnnnnnnnnnnnnnnnnnnnnnnnnnnnnnnnnnnnnnnnnnnnnnnnnnnnnnnnnnnnnnnnnnnnnnnnnnnnnnnnnnnnnnnnnnnnnnnnnnnnnnnnnnnnnnnnnnnnnnnnnnnnnnnnnnnnnnnnnnnnnnnnnnnnnnnnnnnnnnnnnnnnnnnnnnnnnnnnnnnnnnnnnnnnnnnnnnnnnnnnnnnnnnnnnnnnnnnnnnnnnnnnnnnnnnnnnnnnnnnnnnnnnnnnnnnnnnnnnnnnnnnnnnnnnnnnnnnnnnnnnnnnnnnnnnnnnnnnnnnnnnnnnnnnnnnnnnnnnnnnnnnnnnnnnnnnnnnnnnnnnnnnnnnnnnnnnnnnnnnnnnnnnnnnnnnnnnnnnnnnnnnnnnnnnnnnnnnnnnnnnnnnnnnnnnnnnnnnnnnnnnnnnnnnnnnnnnnnnnnnnnnnnnnnnnnnnnnnnnnnnnnnnnnnnnnnnnnnnnnnnnnnnnnnnnnnnnnnnnnnnnnnnnnnnnnnnnnnnnnnnnnnnnnnnnnnnnnnnnnnnnnnnnnnnnnnnnnnnnnnnnnnnnnnnnnnnnnnnnnnnnnnnnnnnnnnnnnnnnnnnnnnnnnnnnnnnnnnnnnnnnnnnnnnnnnnnnnnnnnnnnnnnnnnnnnnnnnnnnnnnnnnnnnnnnnnnnnnnnnnnnnnnnnnnnnnnnnnnnnnnnnnnnnnnnnnnnnnnnnnnnnnnnnnnnnnnnnnnnnnnnnnnnnnnnnnnnnnnnnnnnnnnnnnnnnnnnnnnnnnnnnnnnnnnnnnnnnnnnnnnnnnnnnnnnnnnnnnnnnnnnnnnnnnnnnnnnnnnnnnnnnnnnnnnnnnnnnnnnnnnnnnnnnnnnnnnnnnnnnnnnnnnnnnnnnnnnnnnnnnnnnnnnnnnnnnnnnnnnnnnnnnnnnnnnnnnnnnnnnnnnnnnnnnnnnnnnnnnnnnnnnnnnnnnnnnnnnnnnnnnnnnnnnnnnnnnnnnnnnnnnnnnnnnnnnnnnnnnnnnnnnnnnnnnnnnnnnnnnnnnnnnnnnnnnnnnnnnnnnnnnnnnnnnnnnnnnnnnnnnnnnnnnnnnnnnnnnnnnnnnnnnnnnnnnnnnnnnnnnnnnnnnnnnnnnnnnnnnnnnnnnnnnnnnnnnnnnnnnnnnnnnnnnnnnnnnnnnnnnnnnnnnnnnnnnnnnnnnnnnnnnnnnnnnnnnnnnnnnnnnnnnnnnnnnnnnnnnnnnnnnnnnnnnnnnnnnnnnnnnnnnnnnnnnnnnnnnnnnnnnnnnnnnnnnnnnnnnnnnnnnnnnnnnnnnnnnnnnnnnnnnnnnnnnnnnnnnnnnnnnnnnnnnnnnnnnnnnnnnnnnnnnnnnnnnnnnnnnnnnnnnnnnnnnnnnnnnnnnnnnnnnnnnnnnnnnnnnnnnnnnnnnnnnnnnnnnnnnnnnnnnnnnnnnnnnnnnnnnnnnnnnnnnnnnnnnnnnnnnnnnnnnnnnnnnnnnnnnnnnnnnnnnnnnnnnnnnnnnnnnnnnnnnnnnnnnnnnnnnnnnnnnnnnnnnnnnnnnnnnnnnnnnnnnnnnnnnnnnnnnnnnnnnnnnnnnnnnnnnnnnnnnnnnnnnnnnnnnnnnnnnnnnnnnnnnnnnnnnnnnnnnnnnnnnnnnnnnnnnnnnnnnnnnnnnnnnnnnnnnnnnnnnnnnnnnnnnnnnnnnnnnnnnnnnnnnnnnnnnnnnnnnnnnnnnnnnnnnnnnnnnnnnnnnnnnnnnnnnnnnnnnnnnnnnnnnnnnnnnnnnnnnnnnnnnnnnnnnnnnnnnnnnnnnnnnnnnnnnnnnnnnnnnnnnnnnnnnnnnnnnnnnnnnnnnnnnnnnnnnnnnnnnnnnnnnnnnnnnnnnnnnnnnnnnnnnnnnnnnnnnnnnnnnnnnnnnnnnnnnnnnnnnnnnnnnnnnnnnnnnnnnnnnnnnnnnnnnnnnnnnnnnnnnnnnnnnnnnnnnnnnnnnnnnnnnnnnnnnnnnnnnnnnnnnnnnnnnnnnnnnnnnnnnnnnnnnnnnnnnnnnnnnnnnnnnnnnnnnnnnnnnnnnnnnnnnnnnnnnnnnnnnnnnnnnnnnnnnnnnnnnnnnnnnnnnnnnnnnnnnnnnnnnnnnnnnnnnnnnnnnnnnnnnnnnnnnnnnnnnnnnnnnnnnnnnnnnnnnnnnnnnnnnnnnnnnnnnnnnnnnnnnnnnnnnnnnnnnnnnnnnnnnnnnnnnnnnnnnnnnnnnnnnnnnnnnnnnnnnnnnnnnnnnnnnnnnnnnnnnnnnnnnnnnnnnnnnnnnnnnnnnnnnnnnnnnnnnnnnnnnnnnnnnnnnnnnnnnnnnnnnnnnnnnnnnnnnnnnnnnnnnnnnnnnnnnnnnnnnnnnnnnnnnnnnnnnnnnnnnnnnnnnnnnnnnnnnnnnnnnnnnnnnnnnnnnnnnnnnnnnnnnnnnnnnnnnnnnnnnnnnnnnnnnnnnnnnnnnnnnnnnnnnnnnnnnnnnnnnnnnnnnnnnnnnnnnnnnnnnnnnnnnnnnnnnnnnnnnnnnnnnnnnnnnnnnnnnnnnnnnnnnnnnnnnnnnnnnnnnnnnnnnnnnnnnnnnnnnnnnnnnnnnnnnnnnnnnnnnnnnnnnnnnnnnnnnnnnnnnnnnnnnnnnnnnnnnnnnnnnnnnnnnnnnnnnnnnnnnnnnnnnnnnnnnnnnnnnnnnnnnnnnnnnnnnnnnnnnnnnnnnnnnnnnnnnnnnnnnnnnnnnnnnnnnnnnnnnnnnnnnnnnnnnnnnnnnnnnnnnnnnnnnnnnnnnnnnnnnnnnnnnnnnnnnnnnnnnnnnnnnnnnnnnnnnnnnnnnnnnnnnnnnnnnnnnnnnnnnnnnnnnnnnnnnnnnnnnnnnnnnnnnnnnnnnnnnnnnnnnnnnnnnnnnnnnnnnnnnnnnnnnnnnnnnnnnnnnnnnnnnnnnnnnnnnnnnnnnnnnnnnnnnnnnnnnnnnnnnnnnnnnnnnnnnnnnnnnnnnnnnnnnnnnnnnnnnnnnnnnnnnnnnnnnnnnnnnnnnnnnnnnnnnnnnnnnnnnnnnnnnnnnnnnnnnnnnnnnnnnnnnnnnnnnnnnnnnnnnnnnnnnnnnnnnnnnnnnnnnnnnnnnnnnnnnnnnnnnnnnnnnnnnnnnnnnnnnnnnnnnnnnnnnnnnnnnnnnnnnnnnnnnnnnnnnnnnnnnnnnnnnnnnnnnnnnnnnnnnnnnnnnnnnnnnnnnnnnnnnnnnnnnnnnnnnnnnnnnnnnnnnnnnnnnnnnnnnnnnnnnnnnnnnnnnnnnnnnnnnnnnnnnnnnnnnnnnnnnnnnnnnnnnnnnnnnnnnnnnnnnnnnnnnnnnnnnnnnnnnnnnnnnnnnnnnnnnnnnnnnnnnnnnnnnnnnnnnnnnnnnnnnnnnnnnnnnnnnnnnnnnnnnnnnnnnnnnnnnnnnnnnnnnnnnnnnnnnnnnnnnnnnnnnnnnnnnnnnnnnnnnnnnnnnnnnnnnnnnnnnnnnnnnnnnnnnnnnnnnnnnnnnnnnnnnnnnnnnnnnnnnnnnnnnnnnnnnnnnnnnnnnnnnnnnnnnnnnnnnnnnnnnnnnnnnnnnnnnnnnnnnnnnnnnnnnnnnnnnnnnnnnnnnnnnnnnnnnnnnnnnnnnnnnnnnnnnnnnnnnnnnnnnnnnnnnnnnnnnnnnnnnnnnnnnnnnnnnnnnnnnnnnnnnnnnnnnnnnnnnnnnnnnnnnnnnnnnnnnnnnnnnnnnnnnnnnnnnnnnnnnnnnnnnnnnnnnnnnnnnnnnnnnnnnnnnnnnnnnnnnnnnnnnnnnnnnnnnnnnnnnnnnnnnnnnnnnnnnnnnnnnnnnnnnnnnnnnnnnnnnnnnnnnnnnnnnnnnnnnnnnnnnnnnnnnnnnnnnnnnnnnnnnnnnnnnnnnnnnnnnnnnnnnnnnnnnnnnnnnnnnnnnnnnnnnnnnnnnnnnnnnnnnnnnnnnnnnnnnnnnnnnnnnnnnnnnnnnnnnnnnnnnnnnnnnnnnnnnnnnnnnnnnnnnnnnnnnnnnnnnnnnnnnnnnnnnnnnnnnnnnnnnnnnnnnnnnnnnnnnnnnnnnnnnnnnnnnnnnnnnnnnnnnnnnnnnnnnnnnnnnnnnnnnnnnnnnnnnnnnnnnnnnnnnnnnnnnnnnnnnnnnnnnnnnnnnnnnnnnnnnnnnnnnnnnnnnnnnnnnnnnnnnnnnnnnnnnnnnnnnnnnnnnnnnnnnnnnnnnnnnnnnnnnnnnnnnnnnnnnnnnnnnnnnnnnnnnnnnnnnnnnnnnnnnnnnnnnnnnnnnnnnnnnnnnnnnnnnnnnnnnnnnnnnnnnnnnnnnnnnnnnnnnnnnnnnnnnnnnnnnnnnnnnnnnnnnnnnnnnnnnnnnnnnnnnnnnnnnnnnnnnnnnnnnnnnnnnnnnnnnnnnnnnnnnnnnnnnnnnnnnnnnnnnnnnnnnnnnnnnnnnnnnnnnnnnnnnnnnnnnnnnnnnnnnnnnnnnnnnnnnnnnnnnnnnnnnnnnnnnnnnnnnnnnnnnnnnnnnnnnnnnnnnnnnnnnnnnnnnnnnnnnnnnnnnnnnnnnnnnnnnnnnnnnnnnnnnnnnnnnnnnnnnnnnnnnnnnnnnnnnnnnnnnnnnnnnnnnnnnnnnnnnnnnnnnnnnnnnnnnnnnnnnnnnnnnnnnnnnnnnnnnnnnnnnnnnnnnnnnnnnnnnnnnnnnnnnnnnnnnnnnnnnnnnnnnnnnnnnnnnnnnnnnnnnnnnnnnnnnnnnnnnnnnnnnnnnnnnnnnnnnnnnnnnnnnnnnnnnnnnnnnnnnnnnnnnnnnnnnnnnnnnnnnnnnnnnnnnnnnnnnnnnnnnnnnnnnnnnnnnnnnnnnnnnnnnnnnnnnnnnnnnnnnnnnnnnnnnnnnnnnnnnnnnnnnnnnnnnnnnnnnnnnnnnnnnnnnnnnnnnnnnnnnnnnnnnnnnnnnnnnnnnnnnnnnnnnnnnnnnnnnnnnnnnnnnnnnnnnnnnnnnnnnnnnnnnnnnnnnnnnnnnnnnnnnnnnnnnnnnnnnnnnnnnnnnnnnnnnnnnnnnnnnnnnnnnnnnnnnnnnnnnnnnnnnnnnnnnnnnnnnnnnnnnnnnnnnnnnnnnnnnnnnnnnnnnnnnnnnnnnnnnnnnnnnnnnnnnnnnnnnnnnnnnnnnnnnnnnnnnnnnnnnnnnnnnnnnnnnnnnnnnnnnnnnnnnnnnnnnnnnnnnnnnnnnnnnnnnnnnnnnnnnnnnnnnnnnnnnnnnnnnnnnnnnnnnnnnnnnnnnnnnnnnnnnnnnnnnnnnnnnnnnnnnnnnnnnnnnnnnnnnnnnnnnnnnnnnnnnnnnnnnnnnnnnnnnnnnnnnnnnnnnnnnnnnnnnnnnnnnnnnnnnnnnnnnnnnnnnnnnnnnnnnnnnnnnnnnnnnnnnnnnnnnnnnnnnnnnnnnnnnnnnnnnnnnnnnnnnnnnnnnnnnnnnnnnnnnnnnnnnnnnnnnnnnnnnnnnnnnnnnnnnnnnnnnnnnnnnnnnnnnnnnnnnnnnnnnnnnnnnnnnnnnnnnnnnnnnnnnnnnnnnnnnnnnnnnnnnnnnnnnnnnnnnnnnnnnnnnnnnnnnnnnnnnnnnnnnnnnnnnnnnnnnnnnnnnnnnnnnnnnnnnnnnnnnnnnnnnnnnnnnnnnnnnnnnnnnnnnnnnnnnnnnnnnnnnnnnnnnnnnnnnnnnnnnnnnnnnnnnnnnnnnnnnnnnnnnnnnnnnnnnnnnnnnnnnnnnnnnnnnnnnnnnnnnnnnnnnnnnnnnnnnnnnnnnnnnnnnnnnnnnnnnnnnnnnnnnnnnnnnnnnnnnnnnnnnnnnnnnnnnnnnnnnnnnnnnnnnnnnnnnnnnnnnnnnnnnnnnnnnnnnnnnnnnnnnnnnnnnnnnnnnnnnnnnnnnnnnnnnnnnnnnnnnnnnnnnnnnnnnnnnnnnnnnnnnnnnnnnnnnnnnnnnnnnnnnnnnnnnnnnnnnnnnnnnnnnnnnnnnnnnnnnnnnnnnnnnnnnnnnnnnnnnnnnnnnnnnnnnnnnnnnnnnnnnnnnnnnnnnnnnnnnnnnnnnnnnnnnnnnnnnnnnnnnnnnnnnnnnnnnnnnnnnnnnnnnnnnnnnnnnnnnnnnnnnnnnnnnnnnnnnnnnnnnnnnnnnnnnnnnnnnnnnnnnnnnnnnnnnnnnnnnnnnnnnnnnnnnnnnnnnnnnnnnnnnnnnnnnnnnnnnnnnnnnnnnnnnnnnnnnnnnnnnnnnnnnnnnnnnnnnnnnnnnnnnnnnnnnnnnnnnnnnnnnnnnnnnnnnnnnnnnnnnnnnnnnnnnnnnnnnnnnnnnnnnnnnnnnnnnnnnnnnnnnnnnnnnnnnnnnnnnnnnnnnnnnnnnnnnnnnnnnnnnnnnnnnnnnnnnnnnnnnnnnnnnnnnnnnnnnnnnnnnnnnnnnnnnnnnnnnnnnnnnnnnnnnnnnnnnnnnnnnnnnnnnnnnnnnnnnnnnnnnnnnnnnnnnnnnnnnnnnnnnnnnnnnnnnnnnnnnnnnnnnnnnnnnnnnnnnnnnnnnnnnnnnnnnnnnnnnnnnnnnnnnnnnnnnnnnnnnnnnnnnnnnnnnnnnnnnnnnnnnnnnnnnnnnnnnnnnnnnnnnnnnnnnnnnnnnnnnnnnnnnnnnnnnnnnnnnnnnnnnnnnnnnnnnnnnnnnnnnnnnnnnnnnnnnnnnnnnnnnnnnnnnnnnnnnnnnnnnnnnnnnnnnnnnnnnnnnnnnnnnnnnnnnnnnnnnnnnnnnnnnnnnnnnnnnnnnnnnnnnnnnnnnnnnnnnnnnnnnnnnnnnnnnnnnnnnnnnnnnnnnnnnnnnnnnnnnnnnnnnnnnnnnnnnnnnnnnnnnnnnnnnnnnnnnnnnnnnnnnnnnnnnnnnnnnnnnnnnnnnnnnnnnnnnnnnnnnnnnnnnnnnnnnnnnnnnnnnnnnnnnnnnnnnnnnnnnnnnnnnnnnnnnnnnnnnnnnnnnnnnnnnnnnnnnnnnnnnnnnnnnnnnnnnnnnnnnnnnnnnnnnnnnnnnnnnnnnnnnnnnnnnnnnnnnnnnnnnnnnnnnnnnnnnnnnnnnnnnnnnnnnnnnnnnnnnnnnnnnnnnnnnnnnnnnnnnnnnnnnnnnnnnnnnnnnnnnnnnnnnnnnnnnnnnnnnnnnnnnnnnnnnnnnnnnnnnnnnnnnnnnnnnnnnnnnnnnnnnnnnnnnnnnnnnnnnnnnnnnnnnnnnnnnnnnnnnnnnnnnnnnnnnnnnnnnnnnnnnnnnnnnnnnnnnnnnnnnnnnnnnnnnnnnnnnnnnnnnnnnnnnnnnnnnnnnnnnnnnnnnnnnnnnnnnnnnnnnnnnnnnnnnnnnnnnnnnnnnnnnnnnnnnnnnnnnnnnnnnnnnnnnnnnnnnnnnnnnnnnnnnnnnnnnnnnnnnnnnnnnnnnnnnnnnnnnnnnnnnnnnnnnnnnnnnnnnnnnnnnnnnnnnnnnnnnnnnnnnnnnnnnnnnnnnnnnnnnnnnnnnnnnnnnnnnnnnnnnnnnnnnnnnnnnnnnnnnnnnnnnnnnnnnnnnnnnnnnnnnnnnnnnnnnnnnnnnnnnnnnnnnnnnnnnnnnnnnnnnnnnnnnnnnnnnnnnnnnnnnnnnnnnnnnnnnnnnnnnnnnnnnnnnnnnnnnnnnnnnnnnnnnnnnnnnnnnnnnnnnnnnnnnnnnnnnnnnnnnnnnnnnnnnnnnnnnnnnnnnnnnnnnnnnnnnnnnnnnnnnnnnnnnnnnnnnnnnnnnnnnnnnnnnnnnnnnnnnnnnnnnnnnnnnnnnnnnnnnnnnnnnnnnnnnnnnnnnnnnnnnnnnnnnnnnnnnnnnnnnnnnnnnnnnnnnnnnnnnnnnnnnnnnnnnnnnnnnnnnnnnnnnnnnnnnnnnnnnnnnnnnnnnnnnnnnnnnnnnnnnnnnnnnnnnnnnnnnnnnnnnnnnnnnnnnnnnnnnnnnnnnnnnnnnnnnnnnnnnnnnnnnnnnnnnnnnnnnnnnnnnnnnnnnnnnnnnnnnnnnnnnnnnnnnnnnnnnnnnnnnnnnnnnnnnnnnnnnnnnnnnnnnnnnnnnnnnnnnnnnnnnnnnnnnnnnnnnnnnnnnnnnnnnnnnnnnnnnnnnnnnnnnnnnnnnnnnnnnnnnnnnnnnnnnnnnnnnnnnnnnnnnnnnnnnnnnnnnnnnnnnnnnnnnnnnnnnnnnnnnnnnnnnnnnnnnnnnnnnnnnnnnnnnnnnnnnnnnnnnnnnnnnnnnnnnnnnnnnnnnnnnnnnnnnnnnnnnnnnnnnnnnnnnnnnnnnnnnnnnnnnnnnnnnnnnnnnnnnnnnnnnnnnnnnnnnnnnnnnnnnnnnnnnnnnnnnnnnnnnnnnnnnnnnnnnnnnnnnnnnnnnnnnnnnnnnnnnnnnnnnnnnnnnnnnnnnnnnnnnnnnnnnnnnnnnnnnnnnnnnnnnnnnnnnnnnnnnnnnnnnnnnnnnnnnnnnnnnnnnnnnnnnnnnnnnnnnnnnnnnnnnnnnnnnnnnnnnnnnnnnnnnnnnnnnnnnnnnnnnnnnnnnnnnnnnnnnnnnnnnnnnnnnnnnnnnnnnnnnnnnnnnnnnnnnnnnnnnnnnnnnnnnnnnnnnnnnnnnnnnnnnnnnnnnnnnnnnnnnnnnnnnnnnnnnnnnnnnnnnnnnnnnnnnnnnnnnnnnnnnnnnnnnnnnnnnnnnnnnnnnnnnnnnnnnnnnnnnnnnnnnnnnnnnnnnnnnnnnnnnnnnnnnnnnnnnnnnnnnnnnnnnnnnnnnnnnnnnnnnnnnnnnnnnnnnnnnnnnnnnnnnnnnnnnnnnnnnnnnnnnnnnnnnnnnnnnnnnnnnnnnnnnnnnnnnnnnnnnnnnnnnnnnnnnnnnnnnnnnnnnnnnnnnnnnnnnnnnnnnnnnnnnnnnnnnnnnnnnnnnnnnnnnnnnnnnnnnnnnnnnnnnnnnnnnnnnnnnnnnnnnnnnnnnnnnnnnnnnnnnnnnnnnnnnnnnnnnnnnnnnnnnnnnnnnnnnnnnnnnnnnnnnnnnnnnnnnnnnnnnnnnnnnnnnnnnnnnnnnnnnnnnnnnnnnnnnnnnnnnnnnnnnnnnnnnnnnnnnnnnnnnnnnnnnnnnnnnnnnnnnnnnnnnnnnnnnnnnnnnnnnnnnnnnnnnnnnnnnnnnnnnnnnnnnnnnnnnnnnnnnnnnnnnnnnnnnnnnnnnnnnnnnnnnnnnnnnnnnnnnnnnnnnnnnnnnnnnnnnnnnnnnnnnnnnnnnnnnnnnnnnnnnnnnnnnnnnnnnnnnnnnnnnnnnnnnnnnnnnnnnnnnnnnnnnnnnnnnnnnnnnnnnnnnnnnnnnnnnnnnnnnnnnnnnnnnnnnnnnnnnnnnnnnnnnnnnnnnnnnnnnnnnnnnnnnnnnnnnnnnnnnnnnnnnnnnnnnnnnnnnnnnnnnnnnnnnnnnnnnnnnnnnnnnnnnnnnnnnnnnnnnnnnnnnnnnnnnnnnnnnnnnnnnnnnnnnnnnnnnnnnnnnnnnnnnnnnnnnnnnnnnnnnnnnnnnnnnnnnnnnnnnnnnnnnnnnnnnnnnnnnnnnnnnnnnnnnnnnnnnnnnnnnnnnnnnnnnnnnnnnnnnnnnnnnnnnnnnnnnnnnnnnnnnnnnnnnnnnnnnnnnnnnnnnnnnnnnnnnnnnnnnnnnnnnnnnnnnnnnnnnnnnnnnnnnnnnnnnnnnnnnnnnnnnnnnnnnnnnnnnnnnnnnnnnnnnnnnnnnnnnnnnnnnnnnnnnnnnnnnnnnnnnnnnnnnnnnnnnnnnnnnnnnnnnnnnnnnnnnnnnnnnnnnnnnnnnnnnnnnnnnnnnnnnnnnnnnnnnnnnnnnnnnnnnnnnnnnnnnnnnnnnnnnnnnnnnnnnnnnnnnnnnnnnnnnnnnnnnnnnnnnnnnnnnnnnnnnnnnnnnnnnnnnnnnnnnnnnnnnnnnnnnnnnnnnnnnnnnnnnnnnnnnnnnnnnnnnnnnnnnnnnnnnnnnnnnnnnnnnnnnnnnnnnnnnnnnnnnnnnnnnnnnnnnnnnnnnnnnnnnnnnnnnnnnnnnnnnnnnnnnnnnnnnnnnnnnnnnnnnnnnnnnnnnnnnnnnnnnnnnnnnnnnnnnnnnnnnnnnnnnnnnnnnnnnnnnnnnnnnnnnnnnnnnnnnnnnnnnnnnnnnnnnnnnnnnnnnnnnnnnnnnnnnnnnnnnnnnnnnnnnnnnnnnnnnnnnnnnnnnnnnnnnnnnnnnnnnnnnnnnnnnnnnnnnnnnnnnnnnnnnnnnnnnnnnnnnnnnnnnnnnnnnnnnnnnnnnnnnnnnnnnnnnnnnnnnnnnnnnnnnnnnnnnnnnnnnnnnnnnnnnnnnnnnnnnnnnnnnnnnnnnnnnnnnnnnnnnnnnnnnnnnnnnnnnnnnnnnnnnnnnnnnnnnnnnnnnnnnnnnnnnnnnnnnnnnnnnnnnnnnnnnnnnnnnnnnnnnnnnnnnnnnnnnnnnnnnnnnnnnnnnnnnnnnnnnnnnnnnnnnnnnnnnnnnnnnnnnnnnnnnnnnnnnnnnnnnnnnnnnnnnnnnnnnnnnnnnnnnnnnnnnnnnnnnnnnnnnnnnnnnnnnnnnnnnnnnnnnnnnnnnnnnnnnnnnnnnnnnnnnnnnnnnnnnnnnnnnnnnnnnnnnnnnnnnnnnnnnnnnnnnnnnnnnnnnnnnnnnnnnnnnnnnnnnnnnnnnnnnnnnnnnnnnnnnnnnnnnnnnnnnnnnnnnnnnnnnnnnnnnnnnnnnnnnnnnnnnnnnnnnnnnnnnnnnnnnnnnnnnnnnnnnnnnnnnnnnnnnnnnnnnnnnnnnnnnnnnnnnnnnnnnnnnnnnnnnnnnnnnnnnnnnnnnnnnnnnnnnnnnnnnnnnnnnnnnnnnnnnnnnnnnnnnnnnnnnnnnnnnnnnnnnnnnnnnnnnnnnnnnnnnnnnnnnnnnnnnnnnnnnnnnnnnnnnnnnnnnnnnnnnnnnnnnnnnnnnnnnnnnnnnnnnnnnnnnnnnnnnnnnnnnnnnnnnnnnnnnnnnnnnnnnnnnnnnnnnnnnnnnnnnnnnnnnnnnnnnnnnnnnnnnnnnnnnnnnnnnnnnnnnnnnnnnnnnnnnnnnnnnnnnnnnnnnnnnnnnnnnnnnnnnnnnnnnnnnnnnnnnnnnnnnnnnnnnnnnnnnnnnnnnnnnnnnnnnnnnnnnnnnnnnnnnnnnnnnnnnnnnnnnnnnnnnnnnnnnnnnnnnnnnnnnnnnnnnnnnnnnnnnnnnnnnnnnnnnnnnnnnnnnnnnnnnnnnnnnnnnnnnnnnnnnnnnnnnnnnnnnnnnnnnnnnnnnnnnnnnnnnnnnnnnnnnnnnnnnnnnnnnnnnnnnnnnnnnnnnnnnnnnnnnnnnnnnnnnnnnnnnnnnnnnnnnnnnnnnnnnnnnnnnnnnnnnnnnnnnnnnnnnnnnnnnnnnnnnnnnnnnnnnnnnnnnnnnnnnnnnnnnnnnnnnnnnnnnnnnnnnnnnnnnnnnnnnnnnnnnnnnnnnnnnnnnnnnnnnnnnnnnnnnnnnnnnnnnnnnnnnnnnnnnnnnnnnnnnnnnnnnnnnnnnnnnnnnnnnnnnnnnnnnnnnnnnnnnnnnnnnnnnnnnnnnnnnnnnnnnnnnnnnnnnnnnnnnnnnnnnnnnnnnnnnnnnnnnnnnnnnnnnnnnnnnnnnnnnnnnnnnnnnnnnnnnnnnnnnnnnnnnnnnnnnnnnnnnnnnnnnnnnnnnnnnnnnnnnnnnnnnnnnnnnnnnnnnnnnnnnnnnnnnnnnnnnnnnnnnnnnnnnnnnnnnnnnnnnnnnnnnnnnnnnnnnnnnnnnnnnnnnnnnnnnnnnnnnnnnnnnnnnnnnnnnnnnnnnnnnnnnnnnnnnnnnnnnnnnnnnnnnnnnnnnnnnnnnnnnnnnnnnnnnnnnnnnnnnnnnnnnnnnnnnnnnnnnnnnnnnnnnnnnnnnnnnnnnnnnnnnnnnnnnnnnnnnnnnnnnnnnnnnnnnnnnnnnnnnnnnnnnnnnnnnnnnnnnnnnnnnnnnnnnnnnnnnnnnnnnnnnnnnnnnnnnnnnnnnnnnnnnnnnnnnnnnnnnnnnnnnnnnnnnnnnnnnnnnnnnnnnnnnnnnnnnnnnnnnnnnnnnnnnnnnnnnnnnnnnnnnnnnnnnnnnnnnnnnnnnnnnnnnnnnnnnnnnnnnnnnnnnnnnnnnnnnnnnnnnnnnnnnnnnnnnnnnnnnnnnnnnnnnnnnnnnnnnnnnnnnnnnnnnnnnnnnnnnnnnnnnnnnnnnnnnnnnnnnnnnnnnnnnnnnnnnnnnnnnnnnnnnnnnnnnnnnnnnnnnnnnnnnnnnnnnnnnnnnnnnnnnnnnnnnnnnnnnnnnnnnnnnnnnnnnnnnnnnnnnnnnnnnnnnnnnnnnnnnnnnnnnnnnnnnnnnnnnnnnnnnnnnnnnnnnnnnnnnnnnnnnnnnnnnnnnnnnnnnnnnnnnnnnnnnnnnnnnnnnnnnnnnnnnnnnnnnnnnnnnnnnnnnnnnnnnnnnnnnnnnnnnnnnnnnnnnnnnnnnnnnnnnnnnnnnnnnnnnnnnnnnnnnnnnnnnnnnnnnnnnnnnnnnnnnnnnnnnnnnnnnnnnnnnnnnnnnnnnnnnnnnnnnnnnnnnnnnnnnnnnnnnnnnnnnnnnnnnnnnnnnnnnnnnnnnnnnnnnnnnnnnnnnnnnnnnnnnnnnnnnnnnnnnnnnnnnnnnnnnnnnnnnnnnnnnnnnnnnnnnnnnnnnnnnnnnnnnnnnnnnnnnnnnnnnnnnnnnnnnnnnnnnnnnnnnnnnnnnnnnnnnnnnnnnnnnnnnnnnnnnnnnnnnnnnnnnnnnnnnnnnnnnnnnnnnnnnnnnnnnnnnnnnnnnnnnnnnnnnnnnnnnnnnnnnnnnnnnnnnnnnnnnnnnnnnnnnnnnnnnnnnnnnnnnnnnnnnnnnnnnnnnnnnnnnnnnnnnnnnnnnnnnnnnnnnnnnnnnnnnnnnnnnnnnnnnnnnnnnnnnnnnnnnnnnnnnnnnnnnnnnnnnnnnnnnnnnnnnnnnnnnnnnnnnnnnnnnnnnnnnnnnnnnnnnnnnnnnnnnnnnnnnnnnnnnnnnnnnnnnnnnnnnnnnnnnnnnnnnnnnnnnnnnnnnnnnnnnnnnnnnnnnnnnnnnnnnnnnnnnnnnnnnnnnnnnnnnnnnnnnnnnnnnnnnnnnnnnnnnnnnnnnnnnnnnnnnnnnnnnnnnnnnnnnnnnnnnnnnnnnnnnnnnnnnnnnnnnnnnnnnnnnnnnnnnnnnnnnnnnnnnnnnnnnnnnnnnnnnnnnnnnnnnnnnnnnnnnnnnnnnnnnnnnnnnnnnnnnnnnnnnnnnnnnnnnnnnnnnnnnnnnnnnnnnnnnnnnnnnnnnnnnnnnnnnnnnnnnnnnnnnnnnnnnnnnnnnnnnnnnnnnnnnnnnnnnnnnnnnnnnnnnnnnnnnnnnnnnnnnnnnnnnnnnnnnnnnnnnnnnnnnnnnnnnnnnnnnnnnnnnnnnnnnnnnnnnnnnnnnnnnnnnnnnnnnnnnnnnnnnnnnnnnnnnnnnnnnnnnnnnnnnnnnnnnnnnnnnnnnnnnnnnnnnnnnnnnnnnnnnnnnnnnnnnnnnnnnnnnnnnnnnnnnnnnnnnnnnnnnnnnnnnnnnnnnnnnnnnnnnnnnnnnnnnnnnnnnnnnnnnnnnnnnnnnnnnnnnnnnnnnnnnnnnnnnnnnnnnnnnnnnnnnnnnnnnnnnnnnnnnnnnnnnnnnnnnnnnnnnnnnnnnnnnnnnnnnnnnnnnnnnnnnnnnnnnnnnnnnnnnnnnnnnnnnnnnnnnnnnnnnnnnnnnnnnnnnnnnnnnnnnnnnnnnnnnnnnnnnnnnnnnnnnnnnnnnnnnnnnnnnnnnnnnnnnnnnnnnnnnnnnnnnnnnnnnnnnnnnnnnnnnnnnnnnnnnnnnnnnnnnnnnnnnnnnnnnnnnnnnnnnnnnnnnnnnnnnnnnnnnnnnnnnnnnnnnnnnnnnnnnnnnnnnnnnnnnnnnnnnnnnnnnnnnnnnnnnnnnnnnnnnnnnnnnnnnnnnnnnnnnnnnnnnnnnnnnnnnnnnnnnnnnnnnnnnnnnnnnnnnnnnnnnnnnnnnnnnnnnnnnnnnnnnnnnnnnnnnnnnnnnnnnnnnnnnnnnnnnnnnnnnnnnnnnnnnnnnnnnnnnnnnnnnnnnnnnnnnnnnnnnnnnnnnnnnnnnnnnnnnnnnnnnnnnnnnnnnnnnnnnnnnnnnnnnnnnnnnnnnnnnnnnnnnnnnnnnnnnnnnnnnnnnnnnnnnnnnnnnnnnnnnnnnnnnnnnnnnnnnnnnnnnnnnnnnnnnnnnnnnnnnnnnnnnnnnnnnnnnnnnnnnnnnnnnnnnnnnnnnnnnnnnnnnnnnnnnnnnnnnnnnnnnnnnnnnnnnnnnnnnnnnnnnnnnnnnnnnnnnnnnnnnnnnnnnnnnnnnnnnnnnnnnnnnnnnnnnnnnnnnnnnnnnnnnnnnnnnnnnnnnnnnnnnnnnnnnnnnnnnnnnnnnnnnnnnnnnnnnnnnnnnnnnnnnnnnnnnnnnnnnnnnnnnnnnnnnnnnnnnnnnnnnnnnnnnnnnnnnnnnnnnnnnnnnnnnnnnnnnnnnnnnnnnnnnnnnnnnnnnnnnnnnnnnnnnnnnnnnnnnnnnnnnnnnnnnnnnnnnnnnnnnnnnnnnnnnnnnnnnnnnnnnnnnnnnnnnnnnnnnnnnnnnnnnnnnnnnnnnnnnnnnnnnnnnnnnnnnnnnnnnnnnnnnnnnnnnnnnnnnnnnnnnnnnnnnnnnnnnnnnnnnnnnnnnnnnnnnnnnnnnnnnnnnnnnnnnnnnnnnnnnnnnnnnnnnnnnnnnnnnnnnnnnnnnnnnnnnnnnnnnnnnnnnnnnnnnnnnnnnnnnnnnnnnnnnnnnnnnnnnnnnnnnnnnnnnnnnnnnnnnnnnnnnnnnnnnnnnnnnnnnnnnnnnnnnnnnnnnnnnnnnnnnnnnnnnnnnnnnnnnnnnnnnnnnnnnnnnnnnnnnnnnnnnnnnnnnnnnnnnnnnnnnnnnnnnnnnnnnnnnnnnnnnnnnnnnnnnnnnnnnnnnnnnnnnnnnnnnnnnnnnnnnnnnnnnnnnnnnnnnnnnnnnnnnnnnnnnnnnnnnnnnnnnnnnnnnnnnnnnnnnnnnnnnnnnnnnnnnnnnnnnnnnnnnnnnnnnnnnnnnnnnnnnnnnnnnnnnnnnnnnnnnnnnnnnnnnnnnnnnnnnnnnnnnnnnnnnnnnnnnnnnnnnnnnnnnnnnnnnnnnnnnnnnnnnnnnnnnnnnnnnnnnnnnnnnnnnnnnnnnnnnnnnnnnnnnnnnnnnnnnnnnnnnnnnnnnnnnnnnnnnnnnnnnnnnnnnnnnnnnnnnnnnnnnnnnnnnnnnnnnnnnnnnnnnnnnnnnnnnnnnnnnnnnnnnnnnnnnnnnnnnnnnnnnnnnnnnnnnnnnnnnnnnnnnnnnnnnnnnnnnnnnnnnnnnnnnnnnnnnnnnnnnnnnnnnnnnnnnnnnnnnnnnnnnnnnnnnnnnnnnnnnnnnnnnnnnnnnnnnnnnnnnnnnnnnnnnnnnnnnnnnnnnnnnnnnnnnnnnnnnnnnnnnnnnnnnnnnnnnnnnnnnnnnnnnnnnnnnnnnnnnnnnnnnnnnnnnnnnnnnnnnnnnnnnnnnnnnnnnnnnnnnnnnnnnnnnnnnnnnnnnnnnnnnnnnnnnnnnnnnnnnnnnnnnnnnnnnnnnnnnnnnnnnnnnnnnnnnnnnnnnnnnnnnnnnnnnnnnnnnnnnnnnnnnnnnnnnnnnnnnnnnnnnnnnnnnnnnnnnnnnnnnnnnnnnnnnnnnnnnnnnnnnnnnnnnnnnnnnnnnnnnnnnnnnnnnnnnnnnnnnnnnnnnnnnnnnnnnnnnnnnnnnnnnnnnnnnnnnnnnnnnnnnnnnnnnnnnnnnnnnnnnnnnnnnnnnnnnnnnnnnnnnnnnnnnnnnnnnnnnnnnnnnnnnnnnnnnnnnnnnnnnnnnnnnnnnnnnnnnnnnnnnnnnnnnnnnnnnnnnnnnnnnnnnnnnnnnnnnnnnnnnnnnnnnnnnnnnnnnnnnnnnnnnnnnnnnnnnnnnnnnnnnnnnnnnnnnnnnnnnnnnnnnnnnnnnnnnnnnnnnnnnnnnnnnnnnnnnnnnnnnnnnnnnnnnnnnnnnnnnnnnnnnnnnnnnnnnnnnnnnnnnnnnnnnnnnnnnnnnnnnnnnnnnnnnnnnnnnnnnnnnnnnnnnnnnnnnnnnnnnnnnnnnnnnnnnnnnnnnnnnnnnnnnnnnnnnnnnnnnnnnnnnnnnnnnnnnnnnnnnnnnnnnnnnnnnnnnnnnnnnnnnnnnnnnnnnnnnnnnnnnnnnnnnnnnnnnnnnnnnnnnnnnnnnnnnnnnnnnnnnnnnnnnnnnnnnnnnnnnnnnnnnnnnnnnnnnnnnnnnnnnnnnnnnnnnnnnnnnnnnnnnnnnnnnnnnnnnnnnnnnnnnnnnnnnnnnnnnnnnnnnnnnnnnnnnnnnnnnnnnnnnnnnnnnnnnnnnnnnnnnnnnnnnnnnnnnnnnnnnnnnnnnnnnnnnnnnnnnnnnnnnnnnnnnnnnnnnnnnnnnnnnnnnnnnnnnnnnnnnnnnnnnnnnnnnnnnnnnnnnnnnnnnnnnnnnnnnnnnnnnnnnnnnnnnnnnnnnnnnnnnnnnnnnnnnnnnnnnnnnnnnnnnnnnnnnnnnnnnnnnnnnnnnnnnnnnnnnnnnnnnnnnnnnnnnnnnnnnnnnnnnnnnnnnnnnnnnnnnnnnnnnnnnnnnnnnnnnnnnnnnnnnnnnnnnnnnnnnnnnnnnnnnnnnnnnnnnnnnnnnnnnnnnnnnnnnnnnnnnnnnnnnnnnnnnnnnnnnnnnnnnnnnnnnnnnnnnnnnnnnnnnnnnnnnnnnnnnnnnnnnnnnnnnnnnnnnnnnnnnnnnnnnnnnnnnnnnnnnnnnnnnnnnnnnnnnnnnnnnnnnnnnnnnnnnnnnnnnnnnnnnnnnnnnnnnnnnnnnnnnnnnnnnnnnnnnnnnnnnnnnnnnnnnnnnnnnnnnnnnnnnnnnnnnnnnnnnnnnnnnnnnnnnnnnnnnnnnnnnnnnnnnnnnnnnnnnnnnnnnnnnnnnnnnnnnnnnnnnnnnnnnnnnnnnnnnnnnnnnnnnnnnnnnnnnnnnnnnnnnnnnnnnnnnnnnnnnnnnnnnnnnnnnnnnnnnnnnnnnnnnnnnnnnnnnnnnnnnnnnnnnnnnnnnnnnnnnnnnnnnnnnnnnnnnnnnnnnnnnnnnnnnnnnnnnnnnnnnnnnnnnnnnnnnnnnnnnnnnnnnnnnnnnnnnnnnnnnnnnnnnnnnnnnnnnnnnnnnnnnnnnnnnnnnnnnnnnnnnnnnnnnnnnnnnnnnnnnnnnnnnnnnnnnnnnnnnnnnnnnnnnnnnnnnnnnnnnnnnnnnnnnnnnnnnnnnnnnnnnnnnnnnnnnnnnnnnnnnnnnnnnnnnnnnnnnnnnnnnnnnnnnnnnnnnnnnnnnnnnnnnnnnnnnnnnnnnnnnnnnnnnnnnnnnnnnnnnnnnnnnnnnnnnnnnnnnnnnnnnnnnnnnnnnnnnnnnnnnnnnnnnnnnnnnnnnnnnnnnnnnnnnnnnnnnnnnnnnnnnnnnnnnnnnnnnnnnnnnnnnnnnnnnnnnnnnnnnnnnnnnnnnnnnnnnnnnnnnnnnnnnnnnnnnnnnnnnnnnnnnnnnnnnnnnnnnnnnnnnnnnnnnnnnnnnnnnnnnnnnnnnnnnnnnnnnnnnnnnnnnnnnnnnnnnnnnnnnnnnnnnnnnnnnnnnnnnnnnnnnnnnnnnnnnnnnnnnnnnnnnnnnnnnnnnnnnnnnnnnnnnnnnnnnnnnnnnnnnnnnnnnnnnnnnnnnnnnnnnnnnnnnnnnnnnnnnnnnnnnnnnnnnnnnnnnnnnnnnnnnnnnnnnnnnnnnnnnnnnnnnnnnnnnnnnnnnnnnnnnnnnnnnnnnnnnnnnnnnnnnnnnnnnnnnnnnnnnnnnnnnnnnnnnnnnnnnnnnnnnnnnnnnnnnnnnnnnnnnnnnnnnnnnnnnnnnnnnnnnnnnnnnnnnnnnnnnnnnnnnnnnnnnnnnnnnnnnnnnnnnnnnnnnnnnnnnnnnnnnnnnnnnnnnnnnnnnnnnnnnnnnnnnnnnnnnnnnnnnnnnnnnnnnnnnnnnnnnnnnnnnnnnnnnnnnnnnnnnnnnnnnnnnnnnnnnnnnnnnnnnnnnnnnnnnnnnnnnnnnnnnnnnnnnnnnnnnnnnnnnnnnnnnnnnnnnnnnnnnnnnnnnnnnnnnnnnnnnnnnnnnnnnnnnnnnnnnnnnnnnnnnnnnnnnnnnnnnnnnnnnnnnnnnnnnnnnnnnnnnnnnnnnnnnnnnnnnnnnnnnnnnnnnnnnnnnnnnnnnnnnnnnnnnnnnnnnnnnnnnnnnnnnnnnnnnnnnnnnnnnnnnnnnnnnnnnnnnnnnnnnnnnnnnnnnnnnnnnnnnnnnnnnnnnnnnnnnnnnnnnnnnnnnnnnnnnnnnnnnnnnnnnnnnnnnnnnnnnnnnnnnnnnnnnnnnnnnnnnnnnnnnnnnnnnnnnnnnnnnnnnnnnnnnnnnnnnnnnnnnnnnnnnnnnnnnnnnnnnnnnnnnnnnnnnnnnnnnnnnnnnnnnnnnnnnnnnnnnnnnnnnnnnnnnnnnnnnnnnnnnnnnnnnnnnnnnnnnnnnnnnnnnnnnnnnnnnnnnnnnnnnnnnnnnnnnnnnnnnnnnnnnnnnnnnnnnnnnnnnnnnnnnnnnnnnnnnnnnnnnnnnnnnnnnnnnnnnnnnnnnnnnnnnnnnnnnnnnnnnnnnnnnnnnnnnnnnnnnnnnnnnnnnnnnnnnnnnnnnnnnnnnnnnnnnnnnnnnnnnnnnnnnnnnnnnnnnnnnnnnnnnnnnnnnnnnnnnnnnnnnnnnnnnnnnnnnnnnnnnnnnnnnnnnnnnnnnnnnnnnnnnnnnnnnnnnnnnnnnnnnnnnnnnnnnnnnnnnnnnnnnnnnnnnnnnnnnnnnnnnnnnnnnnnnnnnnnnnnnnnnnnnnnnnnnnnnnnnnnnnnnnnnnnnnnnnnnnnnnnnnnnnnnnnnnnnnnnnnnnnnnnnnnnnnnnnnnnnnnnnnnnnnnnnnnnnnnnnnnnnnnnnnnnnnnnnnnnnnnnnnnnnnnnnnnnnnnnnnnnnnnnnnnnnnnnnnnnnnnnnnnnnnnnnnnnnnnnnnnnnnnnnnnnnnnnnnnnnnnnnnnnnnnnnnnnnnnnnnnnnnnnnnnnnnnnnnnnnnnnnnnnnnnnnnnnnnnnnnnnnnnnnnnnnnnnnnnnnnnnnnnnnnnnnnnnnnnnnnnnnnnnnnnnnnnnnnnnnnnnnnnnnnnnnnnnnnnnnnnnnnnnnnnnnnnnnnnnnnnnnnnnnnnnnnnnnnnnnnnnnnnnnnnnnnnnnnnnnnnnnnnnnnnnnnnnnnnnnnnnnnnnnnnnnnnnnnnnnnnnnnnnnnnnnnnnnnnnnnnnnnnnnnnnnnnnnnnnnnnnnnnnnnnnnnnnnnnnnnnnnnnnnnnnnnnnnnnnnnnnnnnnnnnnnnnnnnnnnnnnnnnnnnnnnnnnnnnnnnnnnnnnnnnnnnnnnnnnnnnnnnnnnnnnnnnnnnnnnnnnnnnnnnnnnnnnnnnnnnnnnnnnnnnnnnnnnnnnnnnnnnnnnnnnnnnnnnnnnnnnnnnnnnnnnnnnnnnnnnnnnnnnnnnnnnnnnnnnnnnnnnnnnnnnnnnnnnnnnnnnnnnnnnnnnnnnnnnnnnnnnnnnnnnnnnnnnnnnnnnnnnnnnnnnnnnnnnnnnnnnnnnnnnnnnnnnnnnnnnnnnnnnnnnnnnnnnnnnnnnnnnnnnnnnnnnnnnnnnnnnnnnnnnnnnnnnnnnnnnnnnnnnnnnnnnnnnnnnnnnnnnnnnnnnnnnnnnnnnnnnnnnnnnnnnnnnnnnnnnnnnnnnnnnnnnnnnnnnnnnnnnnnnnnnnnnnnnnnnnnnnnnnnnnnnnnnnnnnnnnnnnnnnnnnnnnnnnnnnnnnnnnnnnnnnnnnnnnnnnnnnnnnnnnnnnnnnnnnnnnnnnnnnnnnnnnnnnnnnnnnnnnnnnnnnnnnnnnnnnnnnnnnnnnnnnnnnnnnnnnnnnnnnnnnnnnnnnnnnnnnnnnnnnnnnnnnnnnnnnnnnnnnnnnnnnnnnnnnnnnnnnnnnnnnnnnnnnnnnnnnnnnnnnnnnnnnnnnnnnnnnnnnnnnnnnnnnnnnnnnnnnnnnnnnnnnnnnnnnnnnnnnnnnnnnnnnnnnnnnnnnnnnnnnnnnnnnnnnnnnnnnnnnnnnnnnnnnnnnnnnnnnnnnnnnnnnnnnnnnnnnnnnnnnnnnnnnnnnnnnnnnnnnnnnnnnnnnnnnnnnnnnnnnnnnnnnnnnnnnnnnnnnnnnnnnnnnnnnnnnnnnnnnnnnnnnnnnnnnnnnnnnnnnnnnnnnnnnnnnnnnnnnnnnnnnnnnnnnnnnnnnnnnnnnnnnnnnnnnnnnnnnnnnnnnnnnnnnnnnnnnnnnnnnnnnnnnnnnnnnnnnnnnnnnnnnnnnnnnnnnnnnnnnnnnnnnnnnnnnnnnnnnnnnnnnnnnnnnnnnnnnnnnnnnnnnnnnnnnnnnnnnnnnnnnnnnnnnnnnnnnnnnnnnnnnnnnnnnnnnnnnnnnnnnnnnnnnnnnnnnnnnnnnnnnnnnnnnnnnnnnnnnnnnnnnnnnnnnnnnnnnnnnnnnnnnnnnnnnnnnnnnnnnnnnnnnnnnnnnnnnnnnnnnnnnnnnnnnnnnnnnnnnnnnnnnnnnnnnnnnnnnnnnnnnnnnnnnnnnnnnnnnnnnnnnnnnnnnnnnnnnnnnnnnnnnnnnnnnnnnnnnnnnnnnnnnnnnnnnnnnnnnnnnnnnnnnnnnnnnnnnnnnnnnnnnnnnnnnnnnnnnnnnnnnnnnnnnnnnnnnnnnnnnnnnnnnnnnnnnnnnnnnnnnnnnnnnnnnnnnnnnnnnnnnnnnnnnnnnnnnnnnnnnnnnnnnnnnnnnnnnnnnnnnnnnnnnnnnnnnnnnnnnnnnnnnnnnnnnnnnnnnnnnnnnnnnnnnnnnnnnnnnnnnnnnnnnnnnnnnnnnnnnnnnnnnnnnnnnnnnnnnnnnnnnnnnnnnnnnnnnnnnnnnnnnnnnnnnnnnnnnnnnnnnnnnnnnnnnnnnnnnnnnnnnnnnnnnnnnnnnnnnnnnnnnnnnnnnnnnnnnnnnnnnnnnnnnnnnnnnnnnnnnnnnnnnnnnnnnnnnnnnnnnnnnnnnnnnnnnnnnnnnnnnnnnnnnnnnnnnnnnnnnnnnnnnnnnnnnnnnnnnnnnnnnnnnnnnnnnnnnnnnnnnnnnnnnnnnnnnnnnnnnnnnnnnnnnnnnnnnnnnnnnnnnnnnnnnnnnnnnnnnnnnnnnnnnnnnnnnnnnnnnnnnnnnnnnnnnnnnnnnnnnnnnnnnnnnnnnnnnnnnnnnnnnnnnnnnnnnnnnnnnnnnnnnnnnnnnnnnnnnnnnnnnnnnnnnnnnnnnnnnnnnnnnnnnnnnnnnnnnnnnnnnnnnnnnnnnnnnnnnnnnnnnnnnnnnnnnnnnnnnnnnnnnnnnnnnnnnnnnnnnnnnnnnnnnnnnnnnnnnnnnnnnnnnnnnnnnnnnnnnnnnnnnnnnnnnnnnnnnnnnnnnnnnnnnnnnnnnnnnnnnnnnnnnnnnnnnnnnnnnnnnnnnnnnnnnnnnnnnnnnnnnnnnnnnnnnnnnnnnnnnnnnnnnnnnnnnnnnnnnnnnnnnnnnnnnnnnnnnnnnnnnnnnnnnnnnnnnnnnnnnnnnnnnnnnnnnnnnnnnnnnnnnnnnnnnnnnnnnnnnnnnnnnnnnnnnnnnnnnnnnnnnnnnnnnnnnnnnnnnnnnnnnnnnnnnnnnnnnnnnnnnnnnnnnnnnnnnnnnnnnnnnnnnnnnnnnnnnnnnnnnnnnnnnnnnnnnnnnnnnnnnnnnnnnnnnnnnnnnnnnnnnnnnnnnnnnnnnnnnnnnnnnnnnnnnnnnnnnnnnnnnnnnnnnnnnnnnnnnnnnnnnnnnnnnnnnnnnnnnnnnnnnnnnnnnnnnnnnnnnnnnnnnnnnnnnnnnnnnnnnnnnnnnnnnnnnnnnnnnnnnnnnnnnnnnnnnnnnnnnnnnnnnnnnnnnnnnnnnnnnnnnnnnnnnnnnnnnnnnnnnnnnnnnnnnnnnnnnnnnnnnnnnnnnnnnnnnnnnnnnnnnnnnnnnnnnnnnnnnnnnnnnnnnnnnnnnnnnnnnnnnnnnnnnnnnnnnnnnnnnnnnnnnnnnnnnnnnnnnnnnnnnnnnnnnnnnnnnnnnnnnnnnnnnnnnnnnnnnnnnnnnnnnnnnnnnnnnnnnnnnnnnnnnnnnnnnnnnnnnnnnnnnnnnnnnnnnnnnnnnnnnnnnnnnnnnnnnnnnnnnnnnnnnnnnnnnnnnnnnnnnnnnnnnnnnnnnnnnnnnnnnnnnnnnnnnnnnnnnnnnnnnnnnnnnnnnnnnnnnnnnnnnnnnnnnnnnnnnnnnnnnnnnnnnnnnnnnnnnnnnnnnnnnnnnnnnnnnnnnnnnnnnnnnnnnnnnnnnnnnnnnnnnnnnnnnnnnnnnnnnnnnnnnnnnnnnnnnnnnnnnnnnnnnnnnnnnnnnnnnnnnnnnnnnnnnnnnnnnnnnnnnnnnnnnnnnnnnnnnnnnnnnnnnnnnnnnnnnnnnnnnnnnnnnnnnnnnnnnnnnnnnnnnnnnnnnnnnnnnnnnnnnnnnnnnnnnnnnnnnnnnnnnnnnnnnnnnnnnnnnnnnnnnnnnnnnnnnnnnnnnnnnnnnnnnnnnnnnnnnnnnnnnnnnnnnnnnnnnnnnnnnnnnnnnnnnnnnnnnnnnnnnnnnnnnnnnnnnnnnnnnnnnnnnnnnnnnnnnnnnnnnnnnnnnnnnnnnnnnnnnnnnnnnnnnnnnnnnnnnnnnnnnnnnnnnnnnnnnnnnnnnnnnnnnnnnnnnnnnnnnnnnnnnnnnnnnnnnnnnnnnnnnnnnnnnnnnnnnnnnnnnnnnnnnnnnnnnnnnnnnnnnnnnnnnnnnnnnnnnnnnnnnnnnnnnnnnnnnnnnnnnnnnnnnnnnnnnnnnnnnnnnnnnnnnnnnnnnnnnnnnnnnnnnnnnnnnnnnnnnnnnnnnnnnnnnnnnnnnnnnnnnnnnnnnnnnnnnnnnnnnnnnnnnnnnnnnnnnnnnnnnnnnnnnnnnnnnnnnnnnnnnnnnnnnnnnnnnnnnnnnnnnnnnnnnnnnnnnnnnnnnnnnnnnnnnnnnnnnnnnnnnnnnnnnnnnnnnnnnnnnnnnnnnnnnnnnnnnnnnnnnnnnnnnnnnnnnnnnnnnnnnnnnnnnnnnnnnnnnnnnnnnnnnnnnnnnnnnnnnnnnnnnnnnnnnnnnnnnnnnnnnnnnnnnnnnnnnnnnnnnnnnnnnnnnnnnnnnnnnnnnnnnnnnnnnnnnnnnnnnnnnnnnnnnnnnnnnnnnnnnnnnnnnnnnnnnnnnnnnnnnnnnnnnnnnnnnnnnnnnnnnnnnnnnnnnnnnnnnnnnnnnnnnnnnnnnnnnnnnnnnnnnnnnnnnnnnnnnnnnnnnnnnnnnnnnnnnnnnnnnnnnnnnnnnnnnnnnnnnnnnnnnnnnnnnnnnnnnnnnnnnnnnnnnnnnnnnnnnnnnnnnnnnnnnnnnnnnnnnnnnnnnnnnnnnnnnnnnnnnnnnnnnnnnnnnnnnnnnnnnnnnnnnnnnnnnnnnnnnnnnnnnnnnnnnnnnnnnnnnnnnnnnnnnnnnnnnnnnnnnnnnnnnnnnnnnnnnnnnnnnnnnnnnnnnnnnnnnnnnnnnnnnnnnnnnnnnnnnnnnnnnnnnnnnnnnnnnnnnnnnnnnnnnnnnnnnnnnnnnnnnnnnnnnnnnnnnnnnnnnnnnnnnnnnnnnnnnnnnnnnnnnnnnnnnnnnnnnnnnnnnnnnnnnnnnnnnnnnnnnnnnnnnnnnnnnnnnnnnnnnnnnnnnnnnnnnnnnnnnnnnnnnnnnnnnnnnnnnnnnnnnnnnnnnnnnnnnnnnnnnnnnnnnnnnnnnnnnnnnnnnnnnnnnnnnnnnnnnnnnnnnnnnnnnnnnnnnnnnnnnnnnnnnnnnnnnnnnnnnnnnnnnnnnnnnnnnnnnnnnnnnnnnnnnnnnnnnnnnnnnnnnnnnnnnnnnnnnnnnnnnnnnnnnnnnnnnnnnnnnnnnnnnnnnnnnnnnnnnnnnnnnnnnnnnnnnnnnnnnnnnnnnnnnnnnnnnnnnnnnnnnnnnnnnnnnnnnnnnnnnnnnnnnnnnnnnnnnnnnnnnnnnnnnnnnnnnnnnnnnnnnnnnnnnnnnnnnnnnnnnnnnnnnnnnnnnnnnnnnnnnnnnnnnnnnnnnnnnnnnnnnnnnnnnnnnnnnnnnnnnnnnnnnnnnnnnnnnnnnnnnnnnnnnnnnnnnnnnnnnnnnnnnnnnnnnnnnnnnnnnnnnnnnnnnnnnnnnnnnnnnnnnnnnnnnnnnnnnnnnnnnnnnnnnnnnnnnnnnnnnnnnnnnnnnnnnnnnnnnnnnnnnnnnnnnnnnnnnnnnnnnnnnnnnnnnnnnnnnnnnnnnnnnnnnnnnnnnnnnnnnnnnnnnnnnnnnnnnnnnnnnnnnnnnnnnnnnnnnnnnnnnnnnnnnnnnnnnnnnnnnnnnnnnnnnnnnnnnnnnnnnnnnnnnnnnnnnnnnnnnnnnnnnnnnnnnnnnnnnnnnnnnnnnnnnnnnnnnnnnnnnnnnnnnnnnnnnnnnnnnnnnnnnnnnnnnnnnnnnnnnnnnnnnnnnnnnnnnnnnnnnnnnnnnnnnnnnnnnnnnnnnnnnnnnnnnnnnnnnnnnnnnnnnnnnnnnnnnnnnnnnnnnnnnnnnnnnnnnnnnnnnnnnnnnnnnnnnnnnnnnnnnnnnnnnnnnnnnnnnnnnnnnnnnnnnnnnnnnnnnnnnnnnnnnnnnnnnnnnnnnnnnnnnnnnnnnnnnnnnnnnnnnnnnnnnnnnnnnnnnnnnnnnnnnnnnnnnnnnnnnnnnnnnnnnnnnnnnnnnnnnnnnnnnnnnnnnnnnnnnnnnnnnnnnnnnnnnnnnnnnnnnnnnnnnnnnnnnnnnnnnnnnnnnnnnnnnnnnnnnnnnnnnnnnnnnnnnnnnnnnnnnnnnnnnnnnnnnnnnnnnnnnnnnnnnnnnnnnnnnnnnnnnnnnnnnnnnnnnnnnnnnnnnnnnnnnnnnnnnnnnnnnnnnnnnnnnnnnnnnnnnnnnnnnnnnnnnnnnnnnnnnnnnnnnnnnnnnnnnnnnnnnnnnnnnnnnnnnnnnnnnnnnnnnnnnnnnnnnnnnnnnnnnnnnnnnnnnnnnnnnnnnnnnnnnnnnnnnnnnnnnnnnnnnnnnnnnnnnnnnnnnnnnnnnnnnnnnnnnnnnnnnnnnnnnnnnnnnnnnnnnnnnnnnnnnnnnnnnnnnnnnnnnnnnnnnnnnnnnnnnnnnnnnnnnnnnnnnnnnnnnnnnnnnnnnnnnnnnnnnnnnnnnnnnnnnnnnnnnnnnnnnnnnnnnnnnnnnnnnnnnnnnnnnnnnnnnnnnnnnnnnnnnnnnnnnnnnnnnnnnnnnnnnnnnnnnnnnnnnnnnnnnnnnnnnnnnnnnnnnnnnnnnnnnnnnnnnnnnnnnnnnnnnnnnnnnnnnnnnnnnnnnnnnnnnnnnnnnnnnnnnnnnnnnnnnnnnnnnnnnnnnnnnnnnnnnnnnnnnnnnnnnnnnnnnnnnnnnnnnnnnnnnnnnnnnnnnnnnnnnnnnnnnnnnnnnnnnnnnnnnnnnnnnnnnnnnnnnnnnnnnnnnnnnnnnnnnnnnnnnnnnnnnnnnnnnnnnnnnnnnnnnnnnnnnnnnnnnnnnnnnnnnnnnnnnnnnnnnnnnnnnnnnnnnnnnnnnnnnnnnnnnnnnnnnnnnnnnnnnnnnnnnnnnnnnnnnnnnnnnnnnnnnnnnnnnnnnnnnnnnnnnnnnnnnnnnnnnnnnnnnnnnnnnnnnnnnnnnnnnnnnnnnnnnnnnnnnnnnnnnnnnnnnnnnnnnnnnnnnnnnnnnnnnnnnnnnnnnnnnnnnnnnnnnnnnnnnnnnnnnnnnnnnnnnnnnnnnnnnnnnnnnnnnnnnnnnnnnnnnnnnnnnnnnnnnnnnnnnnnnnnnnnnnnnnnnnnnnnnnnnnnnnnnnnnnnnnnnnnnnnnnnnnnnnnnnnnnnnnnnnnnnnnnnnnnnnnnnnnnnnnnnnnnnnnnnnnnnnnnnnnnnnnnnnnnnnnnnnnnnnnnnnnnnnnnnnnnnnnnnnnnnnnnnnnnnnnnnnnnnnnnnnnnnnnnnnnnnnnnnnnnnnnnnnnnnnnnnnnnnnnnnnnnnnnnnnnnnnnnnnnnnnnnnnnnnnnnnnnnnnnnnnnnnnnnnnnnnnnnnnnnnnnnnnnnnnnnnnnnnnnnnnnnnnnnnnnnnnnnnnnnnnnnnnnnnnnnnnnnnnnnnnnnnnnnnnnnnnnnnnnnnnnnnnnnnnnnnnnnnnnnnnnnnnnnnnnnnnnnnnnnnnnnnnnnnnnnnnnnnnnnnnnnnnnnnnnnnnnnnnnnnnnnnnnnnnnnnnnnnnnnnnnnnnnnnnnnnnnnnnnnnnnnnnnnnnnnnnnnnnnnnnnnnnnnnnnnnnnnnnnnnnnnnnnnnnnnnnnnnnnnnnnnnnnnnnnnnnnnnnnnnnnnnnnnnnnnnnnnnnnnnnnnnnnnnnnnnnnnnnnnnnnnnnnnnnnnnnnnnnnnnnnnnnnnnnnnnnnnnnnnnnnnnnnnnnnnnnnnnnnnnnnnnnnnnnnnnnnnnnnnnnnnnnnnnnnnnnnnnnnnnnnnnnnnnnnnnnnnnnnnnnnnnnnnnnnnnnnnnnnnnnnnnnnnnnnnnnnnnnnnnnnnnnnnnnnnnnnnnnnnnnnnnnnnnnnnnnnnnnnnnnnnnnnnnnnnnnnnnnnnnnnnnnnnnnnnnnnnnnnnnnnnnnnnnnnnnnnnnnnnnnnnnnnnnnnnnnnnnnnnnnnnnnnnnnnnnnnnnnnnnnnnnnnnnnnnnnnnnnnnnnnnnnnnnnnnnnnnnnnnnnnnnnnnnnnnnnnnnnnnnnnnnnnnnnnnnnnnnnnnnnnnnnnnnnnnnnnnnnnnnnnnnnnnnnnnnnnnnnnnnnnnnnnnnnnnnnnnnnnnnnnnnnnnnnnnnnnnnnnnnnnnnnnnnnnnnnnnnnnnnnnnnnnnnnnnnnnnnnnnnnnnnnnnnnnnnnnnnnnnnnnnnnnnnnnnnnnnnnnnnnnnnnnnnnnnnnnnnnnnnnnnnnnnnnnnnnnnnnnnnnnnnnnnnnnnnnnnnnnnnnnnnnnnnnnnnnnnnnnnnnnnnnnnnnnnnnnnnnnnnnnnnnnnnnnnnnnnnnnnnnnnnnnnnnnnnnnnnnnnnnnnnnnnnnnnnnnnnnnnnnnnnnnnnnnnnnnnnnnnnnnnnnnnnnnnnnnnnnnnnnnnnnnnnnnnnnnnnnnnnnnnnnnnnnnnnnnnnnnnnnnnnnnnnnnnnnnnnnnnnnnnnnnnnnnnnnnnnnnnnnnnnnnnnnnnnnnnnnnnnnnnnnnnnnnnnnnnnnnnnnnnnnnnnnnnnnnnnnnnnnnnnnnnnnnnnnnnnnnnnnnnnnnnnnnnnnnnnnnnnnnnnnnnnnnnnnnnnnnnnnnnnnnnnnnnnnnnnnnnnnnnnnnnnnnnnnnnnnnnnnnnnnnnnnnnnnnnnnnnnnnnnnnnnnnnnnnnnnnnnnnnnnnnnnnnnnnnnnnnnnnnnnnnnnnnnnnnnnnnnnnnnnnnnnnnnnnnnnnnnnnnnnnnnnnnnnnnnnnnnnnnnnnnnnnnnnnnnnnnnnnnnnnnnnnnnnnnnnnnnnnnnnnnnnnnnnnnnnnnnnnnnnnnnnnnnnnnnnnnnnnnnnnnnnnnnnnnnnnnnnnnnnnnnnnnnnnnnnnnnnnnnnnnnnnnnnnnnnnnnnnnnnnnnnnnnnnnnnnnnnnnnnnnnnnnnnnnnnnnnnnnnnnnnnnnnnnnnnnnnnnnnnnnnnnnnnnnnnnnnnnnnnnnnnnnnnnnnnnnnnnnnnnnnnnnnnnnnnnnnnnnnnnnnnnnnnnnnnnnnnnnnnnnnnnnnnnnnnnnnnnnnnnnnnnnnnnnnnnnnnnnnnnnnnnnnnnnnnnnnnnnnnnnnnnnnnnnnnnnnnnnnnnnnnnnnnnnnnnnnnnnnnnnnnnnnnnnnnnnnnnnnnnnnnnnnnnnnnnnnnnnnnnnnnnnnnnnnnnnnnnnnnnnnnnnnnnnnnnnnnnnnnnnnnnnnnnnnnnnnnnnnnnnnnnnnnnnnnnnnnnnnnnnnnnnnnnnnnnnnnnnnnnnnnnnnnnnnnnnnnnnnnnnnnnnnnnnnnnnnnnnnnnnnnnnnnnnnnnnnnnnnnnnnnnnnnnnnnnnnnnnnnnnnnnnnnnnnnnnnnnnnnnnnnnnnnnnnnnnnnnnnnnnnnnnnnnnnnnnnnnnnnnnnnnnnnnnnnnnnnnnnnnnnnnnnnnnnnnnnnnnnnnnnnnnnnnnnnnnnnnnnnnnnnnnnnnnnnnnnnnnnnnnnnnnnnnnnnnnnnnnnnnnnnnnnnnnnnnnnnnnnnnnnnnnnnnnnnnnnnnnnnnnnnnnnnnnnnnnnnnnnnnnnnnnnnnnnnnnnnnnnnnnnnnnnnnnnnnnnnnnnnnnnnnnnnnnnnnnnnnnnnnnnnnnnnnnnnnnnnnnnnnnnnnnnnnnnnnnnnnnnnnnnnnnnnnnnnnnnnnnnnnnnnnnnnnnnnnnnnnnnnnnnnnnnnnnnnnnnnnnnnnnnnnnnnnnnnnnnnnnnnnnnnnnnnnnnnnnnnnnnnnnnnnnnnnnnnnnnnnnnnnnnnnnnnnnnnnnnnnnnnnnnnnnnnnnnnnnnnnnnnnnnnnnnnnnnnnnnnnnnnnnnnnnnnnnnnnnnnnnnnnnnnnnnnnnnnnnnnnnnnnnnnnnnnnnnnnnnnnnnnnnnnnnnnnnnnnnnnnnnnnnnnnnnnnnnnnnnnnnnnnnnnnnnnnnnnnnnnnnnnnnnnnnnnnnnnnnnnnnnnnnnnnnnnnnnnnnnnnnnnnnnnnnnnnnnnnnnnnnnnnnnnnnnnnnnnnnnnnnnnnnnnnnnnnnnnnnnnnnnnnnnnnnnnnnnnnnnnnnnnnnnnnnnnnnnnnnnnnnnnnnnnnnnnnnnnnnnnnnnnnnnnnnnnnnnnnnnnnnnnnnnnnnnnnnnnnnnnnnnnnnnnnnnnnnnnnnnnnnnnnnnnnnnnnnnnnnnnnnnnnnnnnnnnnnnnnnnnnnnnnnnnnnnnnnnnnnnnnnnnnnnnnnnnnnnnnnnnnnnnnnnnnnnnnnnnnnnnnnnnnnnnnnnnnnnnnnnnnnnnnnnnnnnnnnnnnnnnnnnnnnnnnnnnnnnnnnnnnnnnnnnnnnnnnnnnnnnnnnnnnnnnnnnnnnnnnnnnnnnnnnnnnnnnnnnnnnnnnnnnnnnnnnnnnnnnnnnnnnnnnnnnnnnnnnnnnnnnnnnnnnnnnnnnnnnnnnnnnnnnnnnnnnnnnnnnnnnnnnnnnnnnnnnnnnnnnnnnnnnnnnnnnnnnnnnnnnnnnnnnnnnnnnnnnnnnnnnnnnnnnnnnnnnnnnnnnnnnnnnnnnnnnnnnnnnnnnnnnnnnnnnnnnnnnnnnnnnnnnnnnnnnnnnnnnnnnnnnnnnnnnnnnnnnnnnnnnnnnnnnnnnnnnnnnnnnnnnnnnnnnnnnnnnnnnnnnnnnnnnnnnnnnnnnnnnnnnnnnnnnnnnnnnnnnnnnnnnnnnnnnnnnnnnnnnnnnnnnnnnnnnnnnnnnnnnnnnnnnnnnnnnnnnnnnnnnnnnnnnnnnnnnnnnnnnnnnnnnnnnnnnnnnnnnnnnnnnnnnnnnnnnnnnnnnnnnnnnnnnnnnnnnnnnnnnnnnnnnnnnnnnnnnnnnnnnnnnnnnnnnnnnnnnnnnnnnnnnnnnnnnnnnnnnnnnnnnnnnnnnnnnnnnnnnnnnnnnnnnnnnnnnnnnnnnnnnnnnnnnnnnnnnnnnnnnnnnnnnnnnnnnnnnnnnnnnnnnnnnnnnnnnnnnnnnnnnnnnnnnnnnnnnnnnnnnnnnnnnnnnnnnnnnnnnnnnnnnnnnnnnnnnnnnnnnnnnnnnnnnnnnnnnnnnnnnnnnnnnnnnnnnnnnnnnnnnnnnnnnnnnnnnnnnnnnnnnnnnnnnnnnnnnnnnnnnnnnnnnnnnnnnnnnnnnnnnnnnnnnnnnnnnnnnnnnnnnnnnnnnnnnnnnnnnnnnnnnnnnnnnnnnnnnnnnnnnnnnnnnnnnnnnnnnnnnnnnnnnnnnnnnnnnnnnnnnnnnnnnnnnnnnnnnnnnnnnnnnnnnnnnnnnnnnnnnnnnnnnnnnnnnnnnnnnnnnnnnnnnnnnnnnnnnnnnnnnnnnnnnnnnnnnnnnnnnnnnnnnnnnnnnnnnnnnnnnnnnnnnnnnnnnnnnnnnnnnnnnnnnnnnnnnnnnnnnnnnnnnnnnnnnnnnnnnnnnnnnnnnnnnnnnnnnnnnnnnnnnnnnnnnnnnnnnnnnnnnnnnnnnnnnnnnnnnnnnnnnnnnnnnnnnnnnnnnnnnnnnnnnnnnnnnnnnnnnnnnnnnnnnnnnnnnnnnnnnnnnnnnnnnnnnnnnnnnnnnnnnnnnnnnnnnnnnnnnnnnnnnnnnnnnnnnnnnnnnnnnnnnnnnnnnnnnnnnnnnnnnnnnnnnnnnnnnnnnnnnnnnnnnnnnnnnnnnnnnnnnnnnnnnnnnnnnnnnnnnnnnnnnnnnnnnnnnnnnnnnnnnnnnnnnnnnnnnnnnnnnnnnnnnnnnnnnnnnnnnnnnnnnnnnnnnnnnnnnnnnnnnnnnnnnnnnnnnnnnnnnnnnnnnnnnnnnnnnnnnnnnnnnnnnnnnnnnnnnnnnnnnnnnnnnnnnnnnnnnnnnnnnnnnnnnnnnnnnnnnnnnnnnnnnnnnnnnnnnnnnnnnnnnnnnnnnnnnnnnnnnnnnnnnnnnnnnnnnnnnnnnnnnnnnnnnnnnnnnnnnnnnnnnnnnnnnnnnnnnnnnnnnnnnnnnnnnnnnnnnnnnnnnnnnnnnnnnnnnnnnnnnnnnnnnnnnnnnnnnnnnnnnnnnnnnnnnnnnnnnnnnnnnnnnnnnnnnnnnnnnnnnnnnnnnnnnnnnnnnnnnnnnnnnnnnnnnnnnnnnnnnnnnnnnnnnnnnnnnnnnnnnnnnnnnnnnnnnnnnnnnnnnnnnnnnnnnnnnnnnnnnnnnnnnnnnnnnnnnnnnnnnnnnnnnnnnnnnnnnnnnnnnnnnnnnnnnnnnnnnnnnnnnnnnnnnnnnnnnnnnnnnnnnnnnnnnnnnnnnnnnnnnnnnnnnnnnnnnnnnnnnnnnnnnnnnnnnnnnnnnnnnnnnnnnnnnnnnnnnnnnnnnnnnnnnnnnnnnnnnnnnnnnnnnnnnnnnnnnnnnnnnnnnnnnnnnnnnnnnnnnnnnnnnnnnnnnnnnnnnnnnnnnnnnnnnnnnnnnnnnnnnnnnnnnnnnnnnnnnnnnnnnnnnnnnnnnnnnnnnnnnnnnnnnnnnnnnnnnnnnnnnnnnnnnnnnnnnnnnnnnnnnnnnnnnnnnnnnnnnnnnnnnnnnnnnnnnnnnnnnnnnnnnnnnnnnnnnnnnnnnnnnnnnnnnnnnnnnnnnnnnnnnnnnnnnnnnnnnnnnnnnnnnnnnnnnnnnnnnnnnnnnnnnnnnnnnnnnnnnnnnnnnnnnnnnnnnnnnnnnnnnnnnnnnnnnnnnnnnnnnnnnnnnnnnnnnnnnnnnnnnnnnnnnnnnnnnnnnnnnnnnnnnnnnnnnnnnnnnnnnnnnnnnnnnnnnnnnnnnnnnnnnnnnnnnnnnnnnnnnnnnnnnnnnnnnnnnnnnnnnnnnnnnnnnnnnnnnnnnnnnnnnnnnnnnnnnnnnnnnnnnnnnnnnnnnnnnnnnnnnnnnnnnnnnnnnnnnnnnnnnnnnnnnnnnnnnnnnnnnnnnnnnnnnnnnnnnnnnnnnnnnnnnnnnnnnnnnnnnnnnnnnnnnnnnnnnnnnnnnnnnnnnnnnnnnnnnnnnnnnnnnnnnnnnnnnnnnnnnnnnnnnnnnnnnnnnnnnnnnnnnnnnnnnnnnnnnnnnnnnnnnnnnnnnnnnnnnnnnnnnnnnnnnnnnnnnnnnnnnnnnnnnnnnnnnnnnnnnnnnnnnnnnnnnnnnnnnnnnnnnnnnnnnnnnnnnnnnnnnnnnnnnnnnnnnnnnnnnnnnnnnnnnnnnnnnnnnnnnnnnnnnnnnnnnnnnnnnnnnnnnnnnnnnnnnnnnnnnnnnnnnnnnnnnnnnnnnnnnnnnnnnnnnnnnnnnnnnnnnnnnnnnnnnnnnnnnnnnnnnnnnnnnnnnnnnnnnnnnnnnnnnnnnnnnnnnnnnnnnnnnnnnnnnnnnnnnnnnnnnnnnnnnnnnnnnnnnnnnnnnnnnnnnnnnnnnnnnnnnnnnnnnnnnnnnnnnnnnnnnnnnnnnnnnnnnnnnnnnnnnnnnnnnnnnnnnnnnnnnnnnnnnnnnnnnnnnnnnnnnnnnnnnnnnnnnnnnnnnnnnnnnnnnnnnnnnnnnnnnnnnnnnnnnnnnnnnnnnnnnnnnnnnnnnnnnnnnnnnnnnnnnnnnnnnnnnnnnnnnnnnnnnnnnnnnnnnnnnnnnnnnnnnnnnnnnnnnnnnnnnnnnnnnnnnnnnnnnnnnnnnnnnnnnnnnnnnnnnnnnnnnnnnnnnnnnnnnnnnnnnnnnnnnnnnnnnnnnnnnnnnnnnnnnnnnnnnnnnnnnnnnnnnnnnnnnnnnnnnnnnnnnnnnnnnnnnnnnnnnnnnnnnnnnnnnnnnnnnnnnnnnnnnnnnnnnnnnnnnnnnnnnnnnnnnnnnnnnnnnnnnnnnnnnnnnnnnnnnnnnnnnnnnnnnnnnnnnnnnnnnnnnnnnnnnnnnnnnnnnnnnnnnnnnnnnnnnnnnnnnnnnnnnnnnnnnnnnnnnnnnnnnnnnnnnnnnnnnnnnnnnnnnnnnnnnnnnnnnnnnnnnnnnnnnnnnnnnnnnnnnnnnnnnnnnnnnnnnnnnnnnnnnnnnnnnnnnnnnnnnnnnnnnnnnnnnnnnnnnnnnnnnnnnnnnnnnnnnnnnnnnnnnnnnnnnnnnnnnnnnnnnnnnnnnnnnnnnnnnnnnnnnnnnnnnnnnnnnnnnnnnnnnnnnnnnnnnnnnnnnnnnnnnnnnnnnnnnnnnnnnnnnnnnnnnnnnnnnnnnnnnnnnnnnnnnnnnnnnnnnnnnnnnnnnnnnnnnnnnnnnnnnnnnnnnnnnnnnnnnnnnnnnnnnnnnnnnnnnnnnnnnnnnnnnnnnnnnnnnnnnnnnnnnnnnnnnnnnnnnnnnnnnnnnnnnnnnnnnnnnnnnnnnnnnnnnnnnnnnnnnnnnnnnnnnnnnnnnnnnnnnnnnnnnnnnnnnnnnnnnnnnnnnnnnnnnnnnnnnnnnnnnnnnnnnnnnnnnnnnnnnnnnnnnnnnnnnnnnnnnnnnnnnnnnnnnnnnnnnnnnnnnnnnnnnnnnnnnnnnnnnnnnnnnnnnnnnnnnnnnnnnnnnnnnnnnnnnnnnnnnnnnnnnnnnnnnnnnnnnnnnnnnnnnnnnnnnnnnnnnnnnnnnnnnnnnnnnnnnnnnnnnnnnnnnnnnnnnnnnnnnnnnnnnnnnnnnnnnnnnnnnnnnnnnnnnnnnnnnnnnnnnnnnnnnnnnnnnnnnnnnnnnnnnnnnnnnnnnnnnnnnnnnnnnnnnnnnnnnnnnnnnnnnnnnnnnnnnnnnnnnnnnnnnnnnnnnnnnnnnnnnnnnnnnnnnnnnnnnnnnnnnnnnnnnnnnnnnnnnnnnnnnnnnnnnnnnnnnnnnnnnnnnnnnnnnnnnnnnnnnnnnnnnnnnnnnnnnnnnnnnnnnnnnnnnnnnnnnnnnnnnnnnnnnnnnnnnnnnnnnnnnnnnnnnnnnnnnnnnnnnnnnnnnnnnnnnnnnnnnnnnnnnnnnnnnnnnnnnnnnnnnnnnnnnnnnnnnnnnnnnnnnnnnnnnnnnnnnnnnnnnnnnnnnnnnnnnnnnnnnnnnnnnnnnnnnnnnnnnnnnnnnnnnnnnnnnnnnnnnnnnnnnnnnnnnnnnnnnnnnnnnnnnnnnnnnnnnnnnnnnnnnnnnnnnnnnnnnnnnnnnnnnnnnnnnnnnnnnnnnnnnnnnnnnnnnnnnnnnnnnnnnnnnnnnnnnnnnnnnnnnnnnnnnnnnnnnnnnnnnnnnnnnnnnnnnnnnnnnnnnnnnnnnnnnnnnnnnnnnnnnnnnnnnnnnnnnnnnnnnnnnnnnnnnnnnnnnnnnnnnnnnnnnnnnnnnnnnnnnnnnnnnnnnnnnnnnnnnnnnnnnnnnnnnnnnnnnnnnnnnnnnnnnnnnnnnnnnnnnnnnnnnnnnnnnnnnnnnnnnnnnnnnnnnnnnnnnnnnnnnnnnnnnnnnnnnnnnnnnnnnnnnnnnnnnnnnnnnnnnnnnnnnnnnnnnnnnnnnnnnnnnnnnnnnnnnnnnnnnnnnnnnnnnnnnnnnnnnnnnnnnnnnnnnnnnnnnnnnnnnnnnnnnnnnnnnnnnnnnnnnnnnnnnnnnnnnnnnnnnnnnnnnnnnnnnnnnnnnnnnnnnnnnnnnnnnnnnnnnnnnnnnnnnnnnnnnnnnnnnnnnnnnnnnnnnnnnnnnnnnnnnnnnnnnnnnnnnnnnnnnnnnnnnnnnnnnnnnnnnnnnnnnnnnnnnnnnnnnnnnnnnnnnnnnnnnnnnnnnnnnnnnnnnnnnnnnnnnnnnnnnnnnnnnnnnnnnnnnnnnnnnnnnnnnnnnnnnnnnnnnnnnnnnnnnnnnnnnnnnnnnnnnnnnnnnnnnnnnnnnnnnnnnnnnnnnnnnnnnnnnnnnnnnnnnnnnnnnnnnnnnnnnnnnnnnnnnnnnnnnnnnnnnnnnnnnnnnnnnnnnnnnnnnnnnnnnnnnnnnnnnnnnnnnnnnnnnnnnnnnnnnnnnnnnnnnnnnnnnnnnnnnnnnnnnnnnnnnnnnnnnnnnnnnnnnnnnnnnnnnnnnnnnnnnnnnnnnnnnnnnnnnnnnnnnnnnnnnnnnnnnnnnnnnnnnnnnnnnnnnnnnnnnnnnnnnnnnnnnnnnnnnnnnnnnnnnnnnnnnnnnnnnnnnnnnnnnnnnnnnnnnnnnnnnnnnnnnnnnnnnnnnnnnnnnnnnnnnnnnnnnnnnnnnnnnnnnnnnnnnnnnnnnnnnnnnnnnnnnnnnnnnnnnnnnnnnnnnnnnnnnnnnnnnnnnnnnnnnnnnnnnnnnnnnnnnnnnnnnnnnnnnnnnnnnnnnnnnnnnnnnnnnnnnnnnnnnnnnnnnnnnnnnnnnnnnnnnnnnnnnnnnnnnnnnnnnnnnnnnnnnnnnnnnnnnnnnnnnnnnnnnnnnnnnnnnnnnnnnnnnnnnnnnnnnnnnnnnnnnnnnnnnnnnnnnnnnnnnnnnnnnnnnnnnnnnnnnnnnnnnnnnnnnnnnnnnnnnnnnnnnnnnnnnnnnnnnnnnnnnnnnnnnnnnnnnnnnnnnnnnnnnnnnnnnnnnnnnnnnnnnnnnnnnnnnnnnnnnnnnnnnnnnnnnnnnnnnnnnnnnnnnnnnnnnnnnnnnnnnnnnnnnnnnnnnnnnnnnnnnnnnnnnnnnnnnnnnnnnnnnnnnnnnnnnnnnnnnnnnnnnnnnnnnnnnnnnnnnnnnnnnnnnnnnnnnnnnnnnnnnnnnnnnnnnnnnnnnnnnnnnnnnnnnnnnnnnnnnnnnnnnnnnnnnnnnnnnnnnnnnnnnnnnnnnnnnnnnnnnnnnnnnnnnnnnnnnnnnnnnnnnnnnnnnnnnnnnnnnnnnnnnnnnnnnnnnnnnnnnnnnnnnnnnnnnnnnnnnnnnnnnnnnnnnnnnnnnnnnnnnnnnnnnnnnnnnnnnnnnnnnnnnnnnnnnnnnnnnnnnnnnnnnnnnnnnnnnnnnnnnnnnnnnnnnnnnnnnnnnnnnnnnnnnnnnnnnnnnnnnnnnnnnnnnnnnnnnnnnnnnnnnnnnnnnnnnnnnnnnnnnnnnnnnnnnnnnnnnnnnnnnnnnnnnnnnnnnnnnnnnnnnnnnnnnnnnnnnnnnnnnnnnnnnnnnnnnnnnnnnnnnnnnnnnnnnnnnnnnnnnnnnnnnnnnnnnnnnnnnnnnnnnnnnnnnnnnnnnnnnnnnnnnnnnnnnnnnnnnnnnnnnnnnnnnnnnnnnnnnnnnnnnnnnnnnnnnnnnnnnnnnnnnnnnnnnnnnnnnnnnnnnnnnnnnnnnnnnnnnnnnnnnnnnnnnnnnnnnnnnnnnnnnnnnnnnnnnnnnnnnnnnnnnnnnnnnnnnnnnnnnnnnnnnnnnnnnnnnnnnnnnnnnnnnnnnnnnnnnnnnnnnnnnnnnnnnnnnnnnnnnnnnnnnnnnnnnnnnnnnnnnnnnnnnnnnnnnnnnnnnnnnnnnnnnnnnnnnnnnnnnnnnnnnnnnnnnnnnnnnnnnnnnnnnnnnnnnnnnnnnnnnnnnnnnnnnnnnnnnnnnnnnnnnnnnnnnnnnnnnnnnnnnnnnnnnnnnnnnnnnnnnnnnnnnnnnnnnnnnnnnnnnnnnnnnnnnnnnnnnnnnnnnnnnnnnnnnnnnnnnnnnnnnnnnnnnnnnnnnnnnnnnnnnnnnnnnnnnnnnnnnnnnnnnnnnnnnnnnnnnnnnnnnnnnnnnnnnnnnnnnnnnnnnnnnnnnnnnnnnnnnnnnnnnnnnnnnnnnnnnnnnnnnnnnnnnnnnnnnnnnnnnnnnnnnnnnnnnnnnnnnnnnnnnnnnnnnnnnnnnnnnnnnnnnnnnnnnnnnnnnnnnnnnnnnnnnnnnnnnnnnnnnnnnnnnnnnnnnnnnnnnnnnnnnnnnnnnnnnnnnnnnnnnnnnnnnnnnnnnnnnnnnnnnnnnnnnnnnnnnnnnnnnnnnnnnnnnnnnnnnnnnnnnnnnnnnnnnnnnnnnnnnnnnnnnnnnnnnnnnnnnnnnnnnnnnnnnnnnnnnnnnnnnnnnnnnnnnnnnnnnnnnnnnnnnnnnnnnnnnnnnnnnnnnnnnnnnnnnnnnnnnnnnnnnnnnnnnnnnnnnnnnnnnnnnnnnnnnnnnnnnnnnnnnnnnnnnnnnnnnnnnnnnnnnnnnnnnnnnnnnnnnnnnnnnnnnnnnnnnnnnnnnnnnnnnnnnnnnnnnnnnnnnnnnnnnnnnnnnnnnnnnnnnnnnnnnnnnnnnnnnnnnnnnnnnnnnnnnnnnnnnnnnnnnnnnnnnnnnnnnnnnnnnnnnnnnnnnnnnnnnnnnnnnnnnnnnnnnnnnnnnnnnnnnnnnnnnnnnnnnnnnnnnnnnnnnnnnnnnnnnnnnnnnnnnnnnnnnnnnnnnnnnnnnnnnnnnnnnnnnnnnnnnnnnnnnnnnnnnnnnnnnnnnnnnnnnnnnnnnnnnnnnnnnnnnnnnnnnnnnnnnnnnnnnnnnnnnnnnnnnnnnnnnnnnnnnnnnnnnnnnnnnnnnnnnnnnnnnnnnnnnnnnnnnnnnnnnnnnnnnnnnnnnnnnnnnnnnnnnnnnnnnnnnnnnnnnnnnnnnnnnnnnnnnnnnnnnnnnnnnnnnnnnnnnnnnnnnnnnnnnnnnnnnnnnnnnnnnnnnnnnnnnnnnnnnnnnnnnnnnnnnnnnnnnnnnnnnnnnnnnnnnnnnnnnnnnnnnnnnnnnnnnnnnnnnnnnnnnnnnnnnnnnnnnnnnnnnnnnnnnnnnnnnnnnnnnnnnnnnnnnnnnnnnnnnnnnnnnnnnnnnnnnnnnnnnnnnnnnnnnnnnnnnnnnnnnnnnnnnnnnnnnnnnnnnnnnnnnnnnnnnnnnnnnnnnnnnnnnnnnnnnnnnnnnnnnnnnnnnnnnnnnnnnnnnnnnnnnnnnnnnnnnnnnnnnnnnnnnnnnnnnnnnnnnnnnnnnnnnnnnnnnnnnnnnnnnnnnnnnnnnnnnnnnnnnnnnnnnnnnnnnnnnnnnnnnnnnnnnnnnnnnnnnnnnnnnnnnnnnnnnnnnnnnnnnnnnnnnnnnnnnnnnnnnnnnnnnnnnnnnnnnnnnnnnnnnnnnnnnnnnnnnnnnnnnnnnnnnnnnnnnnnnnnnnnnnnnnnnnnnnnnnnnnnnnnnnnnnnnnnnnnnnnnnnnnnnnnnnnnnnnnnnnnnnnnnnnnnnnnnnnnnnnnnnnnnnnnnnnnnnnnnnnnnnnnnnnnnnnnnnnnnnnnnnnnnnnnnnnnnnnnnnnnnnnnnnnnnnnnnnnnnnnnnnnnnnnnnnnnnnnnnnnnnnnnnnnnnnnnnnnnnnnnnnnnnnnnnnnnnnnnnnnnnnnnnnnnnnnnnnnnnnnnnnnnnnnnnnnnnnnnnnnnnnnnnnnnnnnnnnnnnnnnnnnnnnnnnnnnnnnnnnnnnnnnnnnnnnnnnnnnnnnnnnnnnnnnnnnnnnnnnnnnnnnnnnnnnnnnnnnnnnnnnnnnnnnnnnnnnnnnnnnnnnnnnnnnnnnnnnnnnnnnnnnnnnnnnnnnnnnnnnnnnnnnnnnnnnnnnnnnnnnnnnnnnnnnnnnnnnnnnnnnnnnnnnnnnnnnnnnnnnnnnnnnnnnnnnnnnnnnnnnnnnnnnnnnnnnnnnnnnnnnnnnnnnnnnnnnnnnnnnnnnnnnnnnnnnnnnnnnnnnnnnnnnnnnnnnnnnnnnnnnnnnnnnnnnnnnnnnnnnnnnnnnnnnnnnnnnnnnnnnnnnnnnnnnnnnnnnnnnnnnnnnnnnnnnnnnnnnnnnnnnnnnnnnnnnnnnnnnnnnnnnnnnnnnnnnnnnnnnnnnnnnnnnnnnnnnnnnnnnnnnnnnnnnnnnnnnnnnnnnnnnnnnnnnnnnnnnnnnnnnnnnnnnnnnnnnnnnnnnnnnnnnnnnnnnnnnnnnnnnnnnnnnnnnnnnnnnnnnnnnnnnnnnnnnnnnnnnnnnnnnnnnnnnnnnnnnnnnnnnnnnnnnnnnnnnnnnnnnnnnnnnnnnnnnnnnnnnnnnnnnnnnnnnnnnnnnnnnnnnnnnnnnnnnnnnnnnnnnnnnnnnnnnnnnnnnnnnnnnnnnnnnnnnnnnnnnnnnnnnnnnnnnnnnnnnnnnnnnnnnnnnnnnnnnnnnnnnnnnnnnnnnnnnnnnnnnnnnnnnnnnnnnnnnnnnnnnnnnnnnnnnnnnnnnnnnnnnnnnnnnnnnnnnnnnnnnnnnnnnnnnnnnnnnnnnnnnnnnnnnnnnnnnnnnnnnnnnnnnnnnnnnnnnnnnnnnnnnnnnnnnnnnnnnnnnnnnnnnnnnnnnnnnnnnnnnnnnnnnnnnnnnnnnnnnnnnnnnnnnnnnnnnnnnnnnnnnnnnnnnnnnnnnnnnnnnnnnnnnnnnnnnnnnnnnnnnnnnnnnnnnnnnnnnnnnnnnnnnnnnnnnnnnnnnnnnnnnnnnnnnnnnnnnnnnnnnnnnnnnnnnnnnnnnnnnnnnnnnnnnnnnnnnnnnnnnnnnnnnnnnnnnnnnnnnnnnnnnnnnnnnnnnnnnnnnnnnnnnnnnnnnnnnnnnnnnnnnnnnnnnnnnnnnnnnnnnnnnnnnnnnnnnnnnnnnnnnnnnnnnnnnnnnnnnnnnnnnnnnnnnnnnnnnnnnnnnnnnnnnnnnnnnnnnnnnnnnnnnnnnnnnnnnnnnnnnnnnnnnnnnnnnnnnnnnnnnnnnnnnnnnnnnnnnnnnnnnnnnnnnnnnnnnnnnnnnnnnnnnnnnnnnnnnnnnnnnnnnnnnnnnnnnnnnnnnnnnnnnnnnnnnnnnnnnnnnnnnnnnnnnnnnnnnnnnnnnnnnnnnnnnnnnnnnnnnnnnnnnnnnnnnnnnnnnnnnnnnnnnnnnnnnnnnnnnnnnnnnnnnnnnnnnnnnnnnnnnnnnnnnnnnnnnnnnnnnnnnnnnnnnnnnnnnnnnnnnnnnnnnnnnnnnnnnnnnnnnnnnnnnnnnnnnnnnnnnnnnnnnnnnnnnnnnnnnnnnnnnnnnnnnnnnnnnnnnnnnnnnnnnnnnnnnnnnnnnnnnnnnnnnnnnnnnnnnnnnnnnnnnnnnnnnnnnnnnnnnnnnnnnnnnnnnnnnnnnnnnnnnnnnnnnnnnnnnnnnnnnnnnnnnnnnnnnnnnnnnnnnnnnnnnnnnnnnnnnnnnnnnnnnnnnnnnnnnnnnnnnnnnnnnnnnnnnnnnnnnnnnnnnnnnnnnnnnnnnnnnnnnnnnnnnnnnnnnnnnnnnnnnnnnnnnnnnnnnnnnnnnnnnnnnnnnnnnnnnnnnnnnnnnnnnnnnnnnnnnnnnnnnnnnnnnnnnnnnnnnnnnnnnnnnnnnnnnnnnnnnnnnnnnnnnnnnnnnnnnnnnnnnnnnnnnnnnnnnnnnnnnnnnnnnnnnnnnnnnnnnnnnnnnnnnnnnnnnnnnnnnnnnnnnnnnnnnnnnnnnnnnnnnnnnnnnnnnnnnnnnnnnnnnnnnnnnnnnnnnnnnnnnnnnnnnnnnnnnnnnnnnnnnnnnnnnnnnnnnnnnnnnnnnnnnnnnnnnnnnnnnnnnnnnnnnnnnnnnnnnnnnnnnnnnnnnnnnnnnnnnnnnnnnnnnnnnnnnnnnnnnnnnnnnnnnnnnnnnnnnnnnnnnnnnnnnnnnnnnnnnnnnnnnnnnnnnnnnnnnnnnnnnnnnnnnnnnnnnnnnnnnnnnnnnnnnnnnnnnnnnnnnnnnnnnnnnnnnnnnnnnnnnnnnnnnnnnnnnnnnnnnnnnnnnnnnnnnnnnnnnnnnnnnnnnnnnnnnnnnnnnnnnnnnnnnnnnnnnnnnnnnnnnnnnnnnnnnnnnnnnnnnnnnnnnnnnnnnnnnnnnnnnnnnnnnnnnnnnnnnnnnnnnnnnnnnnnnnnnnnnnnnnnnnnnnnnnnnnnnnnnnnnnnnnnnnnnnnnnnnnnnnnnnnnnnnnnnnnnnnnnnnnnnnnnnnnnnnnnnnnnnnnnnnnnnnnnnnnnnnnnnnnnnnnnnnnnnnnnnnnnnnnnnnnnnnnnnnnnnnnnnnnnnnnnnnnnnnnnnnnnnnnnnnnnnnnnnnnnnnnnnnnnnnnnnnnnnnnnnnnnnnnnnnnnnnnnnnnnnnnnnnnnnnnnnnnnnnnnnnnnnnnnnnnnnnnnnnnnnnnnnnnnnnnnnnnnnnnnnnnnnnnnnnnnnnnnnnnnnnnnnnnnnnnnnnnnnnnnnnnnnnnnnnnnnnnnnnnnnnnnnnnnnnnnnnnnnnnnnnnnnnnnnnnnnnnnnnnnnnnnnnnnnnnnnnnnnnnnnnnnnnnnnnnnnnnnnnnnnnnnnnnnnnnnnnnnnnnnnnnnnnnnnnnnnnnnnnnnnnnnnnnnnnnnnnnnnnnnnnnnnnnnnnnnnnnnnnnnnnnnnnnnnnnnnnnnnnnnnnnnnnnnnnnnnnnnnnnnnnnnnnnnnnnnnnnnnnnnnnnnnnnnnnnnnnnnnnnnnnnnnnnnnnnnnnnnnnnnnnnnnnnnnnnnnnnnnnnnnnnnnnnnnnnnnnnnnnnnnnnnnnnnnnnnnnnnnnnnnnnnnnnnnnnnnnnnnnnnnnnnnnnnnnnnnnnnnnnnnnnnnnnnnnnnnnnnnnnnnnnnnnnnnnnnnnnnnnnnnnnnnnnnnnnnnnnnnnnnnnnnnnnnnnnnnnnnnnnnnnnnnnnnnnnnnnnnnnnnnnnnnnnnnnnnnnnnnnnnnnnnnnnnnnnnnnnnnnnnnnnnnnnnnnnnnnnnnnnnnnnnnnnnnnnnnnnnnnnnnnnnnnnnnnnnnnnnnnnnnnnnnnnnnnnnnnnnnnnnnnnnnnnnnnnnnnnnnnnnnnnnnnnnnnnnnnnnnnnnnnnnnnnnnnnnnnnnnnnnnnnnnnnnnnnnnnnnnnnnnnnnnnnnnnnnnnnnnnnnnnnnnnnnnnnnnnnnnnnnnnnnnnnnnnnnnnnnnnnnnnnnnnnnnnnnnnnnnnnnnnnnnnnnnnnnnnnnnnnnnnnnnnnnnnnnnnnnnnnnnnnnnnnnnnnnnnnnnnnnnnnnnnnnnnnnnnnnnnnnnnnnnnnnnnnnnnnnnnnnnnnnnnnnnnnnnnnnnnnnnnnnnnnnnnnnnnnnnnnnnnnnnnnnnnnnnnnnnnnnnnnnnnnnnnnnnnnnnnnnnnnnnnnnnnnnnnnnnnnnnnnnnnnnnnnnnnnnnnnnnnnnnnnnnnnnnnnnnnnnnnnnnnnnnnnnnnnnnnnnnnnnnnnnnnnnnnnnnnnnnnnnnnnnnnnnnnnnnnnnnnnnnnnnnnnnnnnnnnnnnnnnnnnnnnnnnnnnnnnnnnnnnnnnnnnnnnnnnnnnnnnnnnnnnnnnnnnnnnnnnnnnnnnnnnnnnnnnnnnnnnnnnnnnnnnnnnnnnnnnnnnnnnnnnnnnnnnnnnnnnnnnnnnnnnnnnnnnnnnnnnnnnnnnnnnnnnnnnnnnnnnnnnnnnnnnnnnnnnnnnnnnnnnnnnnnnnnnnnnnnnnnnnnnnnnnnnnnnnnnnnnnnnnnnnnnnnnnnnnnnnnnnnnnnnnnnnnnnnnnnnnnnnnnnnnnnnnnnnnnnnnnnnnnnnnnnnnnnnnnnnnnnnnnnnnnnnnnnnnnnnnnnnnnnnnnnnnnnnnnnnnnnnnnnnnnnnnnnnnnnnnnnnnnnnnnnnnnnnnnnnnnnnnnnnnnnnnnnnnnnnnnnnnnnnnnnnnnnnnnnnnnnnnnnnnnnnnnnnnnnnnnnnnnnnnnnnnnnnnnnnnnnnnnnnnnnnnnnnnnnnnnnnnnnnnnnnnnnnnnnnnnnnnnnnnnnnnnnnnnnnnnnnnnnnnnnnnnnnnnnnnnnnnnnnnnnnnnnnnnnnnnnnnnnnnnnnnnnnnnnnnnnnnnnnnnnnnnnnnnnnnnnnnnnnnnnnnnnnnnnnnnnnnnnnnnnnnnnnnnnnnnnnnnnnnnnnnnnnnnnnnnnnnnnnnnnnnnnnnnnnnnnnnnnnnnnnnnnnnnnnnnnnnnnnnnnnnnnnnnnnnnnnnnnnnnnnnnnnnnnnnnnnnnnnnnnnnnnnnnnnnnnnnnnnnnnnnnnnnnnnnnnnnnnnnnnnnnnnnnnnnnnnnnnnnnnnnnnnnnnnnnnnnnnnnnnnnnnnnnnnnnnnnnnnnnnnnnnnnnnnnnnnnnnnnnnnnnnnnnnnnnnnnnnnnnnnnnnnnnnnnnnnnnnnnnnnnnnnnnnnnnnnnnnnnnnnnnnnnnnnnnnnnnnnnnnnnnnnnnnnnnnnnnnnnnnnnnnnnnnnnnnnnnnnnnnnnnnnnnnnnnnnnnnnnnnnnnnnnnnnnnnnnnnnnnnnnnnnnnnnnnnnnnnnnnnnnnnnnnnnnnnnnnnnnnnnnnnnnnnnnnnnnnnnnnnnnnnnnnnnnnnnnnnnnnnnnnnnnnnnnnnnnnnnnnnnnnnnnnnnnnnnnnnnnnnnnnnnnnnnnnnnnnnnnnnnnnnnnnnnnnnnnnnnnnnnnnnnnnnnnnnnnnnnnnnnnnnnnnnnnnnnnnnnnnnnnnnnnnnnnnnnnnnnnnnnnnnnnnnnnnnnnnnnnnnnnnnnnnnnnnnnnnnnnnnnnnnnnnnnnnnnnnnnnnnnnnnnnnnnnnnnnnnnnnnnnnnnnnnnnnnnnnnnnnnnnnnnnnnnnnnnnnnnnnnnnnnnnnnnnnnnnnnnnnnnnnnnnnnnnnnnnnnnnnnnnnnnnnnnnnnnnnnnnnnnnnnnnnnnnnnnnnnnnnnnnnnnnnnnnnnnnnnnnnnnnnnnnnnnnnnnnnnnnnnnnnnnnnnnnnnnnnnnnnnnnnnnnnnnnnnnnnnnnnnnnnnnnnnnnnnnnnnnnnnnnnnnnnnnnnnnnnnnnnnnnnnnnnnnnnnnnnnnnnnnnnnnnnnnnnnnnnnnnnnnnnnnnnnnnnnnnnnnnnnnnnnnnnnnnnnnnnnnnnnnnnnnnnnnnnnnnnnnnnnnnnnnnnnnnnnnnnnnnnnnnnnnnnnnnnnnnnnnnnnnnnnnnnnnnnnnnnnnnnnnnnnnnnnnnnnnnnnnnnnnnnnnnnnnnnnnnnnnnnnnnnnnnnnnnnnnnnnnnnnnnnnnnnnnnnnnnnnnnnnnnnnnnnnnnnnnnnnnnnnnnnnnnnnnnnnnnnnnnnnnnnnnnnnnnnnnnnnnnnnnnnnnnnnnnnnnnnnnnnnnnnnnnnnnnnnnnnnnnnnnnnnnnnnnnnnnnnnnnnnnnnnnnnnnnnnnnnnnnnnnnnnnnnnnnnnnnnnnnnnnnnnnnnnnnnnnnnnnnnnnnnnnnnnnnnnnnnnnnnnnnnnnnnnnnnnnnnnnnnnnnnnnnnnnnnnnnnnnnnnnnnnnnnnnnnnnnnnnnnnnnnnnnnnnnnnnnnnnnnnnnnnnnnnnnnnnnnnnnnnnnnnnnnnnnnnnnnnnnnnnnnnnnnnnnnnnnnnnnnnnnnnnnnnnnnnnnnnnnnnnnnnnnnnnnnnnnnnnnnnnnnnnnnnnnnnnnnnnnnnnnnnnnnnnnnnnnnnnnnnnnnnnnnnnnnnnnnnnnnnnnnnnnnnnnnnnnnnnnnnnnnnnnnnnnnnnnnnnnnnnnnnnnnnnnnnnnnnnnnnnnnnnnnnnnnnnnnnnnnnnnnnnnnnnnnnnnnnnnnnnnnnnnnnnnnnnnnnnnnnnnnnnnnnnnnnnnnnnnnnnnnnnnnnnnnnnnnnnnnnnnnnnnnnnnnnnnnnnnnnnnnnnnnnnnnnnnnnnnnnnnnnnnnnnnnnnnnnnnnnnnnnnnnnnnnnnnnnnnnnnnnnnnnnnnnnnnnnnnnnnnnnnnnnnnnnnnnnnnnnnnnnnnnnnnnnnnnnnnnnnnnnnnnnnnnnnnnnnnnnnnnnnnnnnnnnnnnnnnnnnnnnnnnnnnnnnnnnnnnnnnnnnnnnnnnnnnnnnnnnnnnnnnnnnnnnnnnnnnnnnnnnnnnnnnnnnnnnnnnnnnnnnnnnnnnnnnnnnnnnnnnnnnnnnnnnnnnnnnnnnnnnnnnnnnnnnnnnnnnnnnnnnnnnnnnnnnnnnnnnnnnnnnnnnnnnnnnnnnnnnnnnnnnnnnnnnnnnnnnnnnnnnnnnnnnnnnnnnnnnnnnnnnnnnnnnnnnnnnnnnnnnnnnnnnnnnnnnnnnnnnnnnnnnnnnnnnnnnnnnnnnnnnnnnnnnnnnnnnnnnnnnnnnnnnnnnnnnnnnnnnnnnnnnnnnnnnnnnnnnnnnnnnnnnnnnnnnnnnnnnnnnnnnnnnnnnnnnnnnnnnnnnnnnnnnnnnnnnnnnnnnnnnnnnnnnnnnnnnnnnnnnnnnnnnnnnnnnnnnnnnnnnnnnnnnnnnnnnnnnnnnnnnnnnnnnnnnnnnnnnnnnnnnnnnnnnnnnnnnnnnnnnnnnnnnnnnnnnnnnnnnnnnnnnnnnnnnnnnnnnnnnnnnnnnnnnnnnnnnnnnnnnnnnnnnnnnnnnnnnnnnnnnnnnnnnnnnnnnnnnnnnnnnnnnnnnnnnnnnnnnnnnnnnnnnnnnnnnnnnnnnnnnnnnnnnnnnnnnnnnnnnnnnnnnnnnnnnnnnnnnnnnnnnnnnnnnnnnnnnnnnnnnnnnnnnnnnnnnnnnnnnnnnnnnnnnnnnnnnnnnnnnnnnnnnnnnnnnnnnnnnnnnnnnnnnnnnnnnnnnnnnnnnnnnnnnnnnnnnnnnnnnnnnnnnnnnnnnnnnnnnnnnnnnnnnnnnnnnnnnnnnnnnnnnnnnnnnnnnnnnnnnnnnnnnnnnnnnnnnnnnnnnnnnnnnnnnnnnnnnnnnnnnnnnnnnnnnnnnnnnnnnnnnnnnnnnnnnnnnnnnnnnnnnnnnnnnnnnnnnnnnnnnnnnnnnnnnnnnnnnnnnnnnnnnnnnnnnnnnnnnnnnnnnnnnnnnnnnnnnnnnnnnnnnnnnnnnnnnnnnnnnnnnnnnnnnnnnnnnnnnnnnnnnnnnnnnnnnnnnnnnnnnnnnnnnnnnnnnnnnnnnnnnnnnnnnnnnnnnnnnnnnnnnnnnnnnnnnnnnnnnnnnnnnnnnnnnnnnnnnnnnnnnnnnnnnnnnnnnnnnnnnnnnnnnnnnnnnnnnnnnnnnnnnnnnnnnnnnnnnnnnnnnnnnnnnnnnnnnnnnnnnnnnnnnnnnnnnnnnnnnnnnnnnnnnnnnnnnnnnnnnnnnnnnnnnnnnnnnnnnnnnnnnnnnnnnnnnnnnnnnnnnnnnnnnnnnnnnnnnnnnnnnnnnnnnnnnnnnnnnnnnnnnnnnnnnnnnnnnnnnnnnnnnnnnnnnnnnnnnnnnnnnnnnnnnnnnnnnnnnnnnnnnnnnnnnnnnnnnnnnnnnnnnnnnnnnnnnnnnnnnnnnnnnnnnnnnnnnnnnnnnnnnnnnnnnnnnnnnnnnnnnnnnnnnnnnnnnnnnnnnnnnnnnnnnnnnnnnnnnnnnnnnnnnnnnnnnnnnnnnnnnnnnnnnnnnnnnnnnnnnnnnnnnnnnnnnnnnnnnnnnnnnnnnnnnnnnnnnnnnnnnnnnnnnnnnnnnnnnnnnnnnnnnnnnnnnnnnnnnnnnnnnnnnnnnnnnnnnnnnnnnnnnnnnnnnnnnnnnnnnnnnnnnnnnnnnnnnnnnnnnnnnnnnnnnnnnnnnnnnnnnnnnnnnnnnnnnnnnnnnnnnnnnnnnnnnnnnnnnnnnnnnnnnnnnnnnnnnnnnnnnnnnnnnnnnnnnnnnnnnnnnnnnnnnnnnnnnnnnnnnnnnnnnnnnnnnnnnnnnnnnnnnnnnnnnnnnnnnnnnnnnnnnnnnnnnnnnnnnnnnnnnnnnnnnnnnnnnnnnnnnnnnnnnnnnnnnnnnnnnnnnnnnnnnnnnnnnnnnnnnnnnnnnnnnnnnnnnnnnnnnnnnnnnnnnnnnnnnnnnnnnnnnnnnnnnnnnnnnnnnnnnnnnnnnnnnnnnnnnnnnnnnnnnnnnnnnnnnnnnnnnnnnnnnnnnnnnnnnnnnnnnnnnnnnnnnnnnnnnnnnnnnnnnnnnnnnnnnnnnnnnnnnnnnnnnnnnnnnnnnnnnnnnnnnnnnnnnnnnnnnnnnnnnnnnnnnnnnnnnnnnnnnnnnnnnnnnnnnnnnnnnnnnnnnnnnnnnnnnnnnnnnnnnnnnnnnnnnnnnnnnnnnnnnnnnnnnnnnnnnnnnnnnnnnnnnnnnnnnnnnnnnnnnnnnnnnnnnnnnnnnnnnnnnnnnnnnnnnnnnnnnnnnnnnnnnnnnnnnnnnnnnnnnnnnnnnnnnnnnnnnnnnnnnnnnnnnnnnnnnnnnnnnnnnnnnnnnnnnnnnnnnnnnnnnnnnnnnnnnnnnnnnnnnnnnnnnnnnnnnnnnnnnnnnnnnnnnnnnnnnnnnnnnnnnnnnnnnnnnnnnnnnnnnnnnnnnnnnnnnnnnnnnnnnnnnnnnnnnnnnnnnnnnnnnnnnnnnnnnnnnnnnnnnnnnnnnnnnnnnnnnnnnnnnnnnnnnnnnnnnnnnnnnnnnnnnnnnnnnnnnnnnnnnnnnnnnnnnnnnnnnnnnnnnnnnnnnnnnnnnnnnnnnnnnnnnnnnnnnnnnnnnnnnnnnnnnnnnnnnnnnnnnnnnnnnnnnnnnnnnnnnnnnnnnnnnnnnnnnnnnnnnnnnnnnnnnnnnnnnnnnnnnnnnnnnnnnnnnnnnnnnnnnnnnnnnnnnnnnnnnnnnnnnnnnnnnnnnnnnnnnnnnnnnnnnnnnnnnnnnnnnnnnnnnnnnnnnnnnnnnnnnnnnnnnnnnnnnnnnnnnnnnnnnnnnnnnnnnnnnnnnnnnnnnnnnnnnnnnnnnnnnnnnnnnnnnnnnnnnnnnnnnnnnnnnnnnnnnnnnnnnnnnnnnnnnnnnnnnnnnnnnnnnnnnnnnnnnnnnnnnnnnnnnnnnnnnnnnnnnnnnnnnnnnnnnnnnnnnnnnnnnnnnnnnnnnnnnnnnnnnnnnnnnnnnnnnnnnnnnnnnnnnnnnnnnnnnnnnnnnnnnnnnnnnnnnnnnnnnnnnnnnnnnnnnnnnnnnnnnnnnnnnnnnnnnnnnnnnnnnnnnnnnnnnnnnnnnnnnnnnnnnnnnnnnnnnnnnnnnnnnnnnnnnnnnnnnnnnnnnnnnnnnnnnnnnnnnnnnnnnnnnnnnnnnnnnnnnnnnnnnnnnnnnnnnnnnnnnnnnnnnnnnnnnnnnnnnnnnnnnnnnnnnnnnnnnnnnnnnnnnnnnnnnnnnnnnnnnnnnnnnnnnnnnnnnnnnnnnnnnnnnnnnnnnnnnnnnnnnnnnnnnnnnnnnnnnnnnnnnnnnnnnnnnnnnnnnnnnnnnnnnnnnnnnnnnnnnnnnnnnnnnnnnnnnnnnnnnnnnnnnnnnnnnnnnnnnnnnnnnnnnnnnnnnnnnnnnnnnnnnnnnnnnnnnnnnnnnnnnnnnnnnnnnnnnnnnnnnnnnnnnnnnnnnnnnnnnnnnnnnnnnnnnnnnnnnnnnnnnnnnnnnnnnnnnnnnnnnnnnnnnnnnnnnnnnnnnnnnnnnnnnnnnnnnnnnnnnnnnnnnnnnnnnnnnnnnnnnnnnnnnnnnnnnnnnnnnnnnnnnnnnnnnnnnnnnnnnnnnnnnnnnnnnnnnnnnnnnnnnnnnnnnnnnnnnnnnnnnnnnnnnnnnnnnnnnnnnnnnnnnnnnnnnnnnnnnnnnnnnnnnnnnnnnnnnnnnnnnnnnnnnnnnnnnnnnnnnnnnnnnnnnnnnnnnnnnnnnnnnnnnnnnnnnnnnnnnnnnnnnnnnnnnnnnnnnnnnnnnnnnnnnnnnnnnnnnnnnnnnnnnnnnnnnnnnnnnnnnnnnnnnnnnnnnnnnnnnnnnnnnnnnnnnnnnnnnnnnnnnnnnnnnnnnnnnnnnnnnnnnnnnnnnnnnnnnnnnnnnnnnnnnnnnnnnnnnnnnnnnnnnnnnnnnnnnnnnnnnnnnnnnnnnnnnnnnnnnnnnnnnnnnnnnnnnnnnnnnnnnnnnnnnnnnnnnnnnnnnnnnnnnnnnnnnnnnnnnnnnnnnnnnnnnnnnnnnnnnnnnnnnnnnnnnnnnnnnnnnnnnnnnnnnnnnnnnnnnnnnnnnnnnnnnnnnnnnnnnnnnnnnnnnnnnnnnnnnnnnnnnnnnnnnnnnnnnnnnnnnnnnnnnnnnnnnnnnnnnnnnnnnnnnnnnnnnnnnnnnnnnnnnnnnnnnnnnnnnnnnnnnnnnnnnnnnnnnnnnnnnnnnnnnnnnnnnnnnnnnnnnnnnnnnnnnnnnnnnnnnnnnnnnnnnnnnnnnnnnnnnnnnnnnnnnnnnnnnnnnnnnnnnnnnnnnnnnnnnnnnnnnnnnnnnnnnnnnnnnnnnnnnnnnnnnnnnnnnnnnnnnnnnnnnnnnnnnnnnnnnnnnnnnnnnnnnnnnnnnnnnnnnnnnnnnnnnnnnnnnnnnnnnnnnnnnnnnnnnnnnnnnnnnnnnnnnnnnnnnnnnnnnnnnnnnnnnnnnnnnnnnnnnnnnnnnnnnnnnnnnnnnnnnnnnnnnnnnnnnnnnnnnnnnnnnnnnnnnnnnnnnnnnnnnnnnnnnnnnnnnnnnnnnnnnnnnnnnnnnnnnnnnnnnnnnnnnnnnnnnnnnnnnnnnnnnnnnnnnnnnnnnnnnnnnnnnnnnnnnnnnnnnnnnnnnnnnnnnnnnnnnnnnnnnnnnnnnnnnnnnnnnnnnnnnnnnnnnnnnnnnnnnnnnnnnnnnnnnnnnnnnnnnnnnnnnnnnnnnnnnnnnnnnnnnnnnnnnnnnnnnnnnnnnnnnnnnnnnnnnnnnnnnnnnnnnnnnnnnnnnnnnnnnnnnnnnnnnnnnnnnnnnnnnnnnnnnnnnnnnnnnnnnnnnnnnnnnnnnnnnnnnnnnnnnnnnnnnnnnnnnnnnnnnnnnnnnnnnnnnnnnnnnnnnnnnnnnnnnnnnnnnnnnnnnnnnnnnnnnnnnnnnnnnnnnnnnnnnnnnnnnnnnnnnnnnnnnnnnnnnnnnnnnnnnnnnnnnnnnnnnnnnnnnnnnnnnnnnnnnnnnnnnnnnnnnnnnnnnnnnnnnnnnnnnnnnnnnnnnnnnnnnnnnnnnnnnnnnnnnnnnnnnnnnnnnnnnnnnnnnnnnnnnnnnnnnnnnnnnnnnnnnnnnnnnnnnnnnnnnnnnnnnnnnnnnnnnnnnnnnnnnnnnnnnnnnnnnnnnnnnnnnnnnnnnnnnnnnnnnnnnnnnnnnnnnnnnnnnnnnnnnnnnnnnnnnnnnnnnnnnnnnnnnnnnnnnnnnnnnnnnnnnnnnnnnnnnnnnnnnnnnnnnnnnnnnnnnnnnnnnnnnnnnnnnnnnnnnnnnnnnnnnnnnnnnnnnnnnnnnnnnnnnnnnnnnnnnnnnnnnnnnnnnnnnnnnnnnnnnnnnnnnnnnnnnnnnnnnnnnnnnnnnnnnnnnnnnnnnnnnnnnnnnnnnnnnnnnnnnnnnnnnnnnnnnnnnnnnnnnnnnnnnnnnnnnnnnnnnnnnnnnnnnnnnnnnnnnnnnnnnnnnnnnnnnnnnnnnnnnnnnnnnnnnnnnnnnnnnnnnnnnnnnnnnnnnnnnnnnnnnnnnnnnnnnnnnnnnnnnnnnnnnnnnnnnnnnnnnnnnnnnnnnnnnnnnnnnnnnnnnnnnnnnnnnnnnnnnnnnnnnnnnnnnnnnnnnnnnnnnnnnnnnnnnnnnnnnnnnnnnnnnnnnnnnnnnnnnnnnnnnnnnnnnnnnnnnnnnnnnnnnnnnnnnnnnnnnnnnnnnnnnnnnnnnnnnnnnnnnnnnnnnnnnnnnnnnnnnnnnnnnnnnnnnnnnnnnnnnnnnnnnnnnnnnnnnnnnnnnnnnnnnnnnnnnnnnnnnnnnnnnnnnnnnnnnnnnnnnnnnnnnnnnnnnnnnnnnnnnnnnnnnnnnnnnnnnnnnnnnnnnnnnnnnnnnnnnnnnnnnnnnnnnnnnnnnnnnnnnnnnnnnnnnnnnnnnnnnnnnnnnnnnnnnnnnnnnnnnnnnnnnnnnnnnnnnnnnnnnnnnnnnnnnnnnnnnnnnnnnnnnnnnnnnnnnnnnnnnnnnnnnnnnnnnnnnnnnnnnnnnnnnnnnnnnnnnnnnnnnnnnnnnnnnnnnnnnnnnnnnnnnnnnnnnnnnnnnnnnnnnnnnnnnnnnnnnnnnnnnnnnnnnnnnnnnnnnnnnnnnnnnnnnnnnnnnnnnnnnnnnnnnnnnnnnnnnnnnnnnnnnnnnnnnnnnnnnnnnnnnnnnnnnnnnnnnnnnnnnnnnnnnnnnnnnnnnnnnnnnnnnnnnnnnnnnnnnnnnnnnnnnnnnnnnnnnnnnnnnnnnnnnnnnnnnnnnnnnnnnnnnnnnnnnnnnnnnnnnnnnnnnnnnnnnnnnnnnnnnnnnnnnnnnnnnnnnnnnnnnnnnnnnnnnnnnnnnnnnnnnnnnnnnnnnnnnnnnnnnnnnnnnnnnnnnnnnnnnnnnnnnnnnnnnnnnnnnnnnnnnnnnnnnnnnnnnnnnnnnnnnnnnnnnnnnnnnnnnnnnnnnnnnnnnnnnnnnnnnnnnnnnnnnnnnnnnnnnnnnnnnnnnnnnnnnnnnnnnnnnnnnnnnnnnnnnnnnnnnnnnnnnnnnnnnnnnnnnnnnnnnnnnnnnnnnnnnnnnnnnnnnnnnnnnnnnnnnnnnnnnnnnnnnnnnnnnnnnnnnnnnnnnnnnnnnnnnnnnnnnnnnnnnnnnnnnnnnnnnnnnnnnnnnnnnnnnnnnnnnnnnnnnnnnnnnnnnnnnnnnnnnnnnnnnnnnnnnnnnnnnnnnnnnnnnnnnnnnnnnnnnnnnnnnnnnnnnnnnnnnnnnnnnnnnnnnnnnnnnnnnnnnnnnnnnnnnnnnnnnnnnnnnnnnnnnnnnnnnnnnnnnnnnnnnnnnnnnnnnnnnnnnnnnnnnnnnnnnnnnnnnnnnnnnnnnnnnnnnnnnnnnnnnnnnnnnnnnnnnnnnnnnnnnnnnnnnnnnnnnnnnnnnnnnnnnnnnnnnnnnnnnnnnnnnnnnnnnnnnnnnnnnnnnnnnnnnnnnnnnnnnnnnnnnnnnnnnnnnnnnnnnnnnnnnnnnnnnnnnnnnnnnnnnnnnnnnnnnnnnnnnnnnnnnnnnnnnnnnnnnnnnnnnnnnnnnnnnnnnnnnnnnnnnnnnnnnnnnnnnnnnnnnnnnnnnnnnnnnnnnnnnnnnnnnnnnnnnnnnnnnnnnnnnnnnnnnnnnnnnnnnnnnnnnnnnnnnnnnnnnnnnnnnnnnnnnnnnnnnnnnnnnnnnnnnnnnnnnnnnnnnnnnnnnnnnnnnnnnnnnnnnnnnnnnnnnnnnnnnnnnnnnnnnnnnnnnnnnnnnnnnnnnnnnnnnnnnnnnnnnnnnnnnnnnnnnnnnnnnnnnnnnnnnnnnnnnnnnnnnnnnnnnnnnnnnnnnnnnnnnnnnnnnnnnnnnnnnnnnnnnnnnnnnnnnnnnnnnnnnnnnnnnnnnnnnnnnnnnnnnnnnnnnnnnnnnnnnnnnnnnnnnnnnnnnnnnnnnnnnnnnnnnnnnnnnnnnnnnnnnnnnnnnnnnnnnnnnnnnnnnnnnnnnnnnnnnnnnnnnnnnnnnnnnnnnnnnnnnnnnnnnnnnnnnnnnnnnnnnnnnnnnnnnnnnnnnnnnnnnnnnnnnnnnnnnnnnnnnnnnnnnnnnnnnnnnnnnnnnnnnnnnnnnnnnnnnnnnnnnnnnnnnnnnnnnnnnnnnnnnnnnnnnnnnnnnnnnnnnnnnnnnnnnnnnnnnnnnnnnnnnnnnnnnnnnnnnnnnnnnnnnnnnnnnnnnnnnnnnnnnnnnnnnnnnnnnnnnnnnnnnnnnnnnnnnnnnnnnnnnnnnnnnnnnnnnnnnnnnnnnnnnnnnnnnnnnnnnnnnnnnnnnnnnnnnnnnnnnnnnnnnnnnnnnnnnnnnnnnnnnnnnnnnnnnnnnnnnnnnnnnnnnnnnnnnnnnnnnnnnnnnnnnnnnnnnnnnnnnnnnnnnnnnnnnnnnnnnnnnnnnnnnnnnnnnnnnnnnnnnnnnnnnnnnnnnnnnnnnnnnnnnnnnnnnnnnnnnnnnnnnnnnnnnnnnnnnnnnnnnnnnnnnnnnnnnnnnnnnnnnnnnnnnnnnnnnnnnnnnnnnnnnnnnnnnnnnnnnnnnnnnnnnnnnnnnnnnnnnnnnnnnnnnnnnnnnnnnnnnnnnnnnnnnnnnnnnnnnnnnnnnnnnnnnnnnnnnnnnnnnnnnnnnnnnnnnnnnnnnnnnnnnnnnnnnnnnnnnnnnnnnnnnnnnnnnnnnnnnnnnnnnnnnnnnnnnnnnnnnnnnnnnnnnnnnnnnnnnnnnnnnnnnnnnnnnnnnnnnnnnnnnnnnnnnnnnnnnnnnnnnnnnnnnnnnnnnnnnnnnnnnnnnnnnnnnnnnnnnnnnnnnnnnnnnnnnnnnnnnnnnnnnnnnnnnnnnnnnnnnnnnnnnnnnnnnnnnnnnnnnnnnnnnnnnnnnnnnnnnnnnnnnnnnnnnnnnnnnnnnnnnnnnnnnnnnnnnnnnnnnnnnnnnnnnnnnnnnnnnnnnnnnnnnnnnnnnnnnnnnnnnnnnnnnnnnnnnnnnnnnnnnnnnnnnnnnnnnnnnnnnnnnnnnnnnnnnnnnnnnnnnnnnnnnnnnnnnnnnnnnnnnnnnnnnnnnnnnnnnnnnnnnnnnnnnnnnnnnnnnnnnnnnnnnnnnnnnnnnnnnnnnnnnnnnnnnnnnnnnnnnnnnnnnnnnnnnnnnnnnnnnnnnnnnnnnnnnnnnnnnnnnnnnnnnnnnnnnnnnnnnnnnnnnnnnnnnnnnnnnnnnnnnnnnnnnnnnnnnnnnnnnnnnnnnnnnnnnnnnnnnnnnnnnnnnnnnnnnnnnnnnnnnnnnnnnnnnnnnnnnnnnnnnnnnnnnnnnnnnnnnnnnnnnnnnnnnnnnnnnnnnnnnnnnnnnnnnnnnnnnnnnnnnnnnnnnnnnnnnnnnnnnnnnnnnnnnnnnnnnnnnnnnnnnnnnnnnnnnnnnnnnnnnnnnnnnnnnnnnnnnnnnnnnnnnnnnnnnnnnnnnnnnnnnnnnnnnnnnnnnnnnnnnnnnnnnnnnnnnnnnnnnnnnnnnnnnnnnnnnnnnnnnnnnnnnnnnnnnnnnnnnnnnnnnnnnnnnnnnnnnnnnnnnnnnnnnnnnnnnnnnnnnnnnnnnnnnnnnnnnnnnnnnnnnnnnnnnnnnnnnnnnnnnnnnnnnnnnnnnnnnnnnnnnnnnnnnnnnnnnnnnnnnnnnnnnnnnnnnnnnnnnnnnnnnnnnnnnnnnnnnnnnnnnnnnnnnnnnnnnnnnnnnnnnnnnnnnnnnnnnnnnnnnnnnnnnnnnnnnnnnnnnnnnnnnnnnnnnnnnnnnnnnnnnnnnnnnnnnnnnnnnnnnnnnnnnnnnnnnnnnnnnnnnnnnnnnnnnnnnnnnnnnnnnnnnnnnnnnnnnnnnnnnnnnnnnnnnnnnnnnnnnnnnnnnnnnnnnnnnnnnnnnnnnnnnnnnnnnnnnnnnnnnnnnnnnnnnnnnnnnnnnnnnnnnnnnnnnnnnnnnnnnnnnnnnnnnnnnnnnnnnnnnnnnnnnnnnnnnnnnnnnnnnnnnnnnnnnnnnnnnnnnnnnnnnnnnnnnnnnnnnnnnnnnnnnnnnnnnnnnnnnnnnnnnnnnnnnnnnnnnnnnnnnnnnnnnnnnnnnnnnnnnnnnnnnnnnnnnnnnnnnnnnnnnnnnnnnnnnnnnnnnnnnnnnnnnnnnnnnnnnnnnnnnnnnnnnnnnnnnnnnnnnnnnnnnnnnnnnnnnnnnnnnnnnnnnnnnnnnnnnnnnnnnnnnnnnnnnnnnnnnnnnnnnnnnnnnnnnnnnnnnnnnnnnnnnnnnnnnnnnnnnnnnnnnnnnnnnnnnnnnnnnnnnnnnnnnnnnnnnnnnnnnnnnnnnnnnnnnnnnnnnnnnnnnnnnnnnnnnnnnnnnnnnnnnnnnnnnnnnnnnnnnnnnnnnnnnnnnnnnnnnnnnnnnnnnnnnnnnnnnnnnnnnnnnnnnnnnnnnnnnnnnnnnnnnnnnnnnnnnnnnnnnnnnnnnnnnnnnnnnnnnnnnnnnnnnnnnnnnnnnnnnnnnnnnnnnnnnnnnnnnnnnnnnnnnnnnnnnnnnnnnnnnnnnnnnnnnnnnnnnnnnnnnnnnnnnnnnnnnnnnnnnnnnnnnnnnnnnnnnnnnnnnnnnnnnnnnnnnnnnnnnnnnnnnnnnnnnnnnnnnnnnnnnnnnnnnnnnnnnnnnnnnnnnnnnnnnnnnnnnnnnnnnnnnnnnnnnnnnnnnnnnnnnnnnnnnnnnnnnnnnnnnnnnnnnnnnnnnnnnnnnnnnnnnnnnnnnnnnnnnnnnnnnnnnnnnnnnnnnnnnnnnnnnnnnnnnnnnnnnnnnnnnnnnnnnnnnnnnnnnnnnnnnnnnnnnnnnnnnnnnnnnnnnnnnnnnnnnnnnnnnnnnnnnnnnnnnnnnnnnnnnnnnnnnnnnnnnnnnnnnnnnnnnnnnnnnnnnnnnnnnnnnnnnnnnnnnnnnnnnnnnnnnnnnnnnnnnnnnnnnnnnnnnnnnnnnnnnnnnnnnnnnnnnnnnnnnnnnnnnnnnnnnnnnnnnnnnnnnnnnnnnnnnnnnnnnnnnnnnnnnnnnnnnnnnnnnnnnnnnnnnnnnnnnnnnnnnnnnnnnnnnnnnnnnnnnnnnnnnnnnnnnnnnnnnnnnnnnnnnnnnnnnnnnnnnnnnnnnnnnnnnnnnnnnnnnnnnnnnnnnnnnnnnnnnnnnnnnnnnnnnnnnnnnnnnnnnnnnnnnnnnnnnnnnnnnnnnnnnnnnnnnnnnnnnnnnnnnnnnnnnnnnnnnnnnnnnnnnnnnnnnnnnnnnnnnnnnnnnnnnnnnnnnnnnnnnnnnnnnnnnnnnnnnnnnnnnnnnnnnnnnnnnnnnnnnnnnnnnnnnnnnnnnnnnnnnnnnnnnnnnnnnnnnnnnnnnnnnnnnnnnnnnnnnnnnnnnnnnnnnnnnnnnnnnnnnnnnnnnnnnnnnnnnnnnnnnnnnnnnnnnnnnnnnnnnnnnnnnnnnnnnnnnnnnnnnnnnnnnnnnnnnnnnnnnnnnnnnnnnnnnnnnnnnnnnnnnnnnnnnnnnnnnnnnnnnnnnnnnnnnnnnnnnnnnnnnnnnnnnnnnnnnnnnnnnnnnnnnnnnnnnnnnnnnnnnnnnnnnnnnnnnnnnnnnnnnnnnnnnnnnnnnnnnnnnnnnnnnnnnnnnnnnnnnnnnnnnnnnnnnnnnnnnnnnnnnnnnnnnnnnnnnnnnnnnnnnnnnnnnnnnnnnnnnnnnnnnnnnnnnnnnnnnnnnnnnnnnnnnnnnnnnnnnnnnnnnnnnnnnnnnnnnnnnnnnnnnnnnnnnnnnnnnnnnnnnnnnnnnnnnnnnnnnnnnnnnnnnnnnnnnnnnnnnnnnnnnnnnnnnnnnnnnnnnnnnnnnnnnnnnnnnnnnnnnnnnnnnnnnnnnnnnnnnnnnnnnnnnnnnnnnnnnnnnnnnnnnnnnnnnnnnnnnnnnnnnnnnnnnnnnnnnnnnnnnnnnnnnnnnnnnnnnnnnnnnnnnnnnnnnnnnnnnnnnnnnnnnnnnnnnnnnnnnnnnnnnnnnnnnnnnnnnnnnnnnnnnnnnnnnnnnnnnnnnnnnnnnnnnnnnnnnnnnnnnnnnnnnnnnnnnnnnnnnnnnnnnnnnnnnnnnnnnnnnnnnnnnnnnnnnnnnnnnnnnnnnnnnnnnnnnnnnnnnnnnnnnnnnnnnnnnnnnnnnnnnnnnnnnnnnnnnnnnnnnnnnnnnnnnnnnnnnnnnnnnnnnnnnnnnnnnnnnnnnnnnnnnnnnnnnnnnnnnnnnnnnnnnnnnnnnnnnnnnnnnnnnnnnnnnnnnnnnnnnnnnnnnnnnnnnnnnnnnnnnnnnnnnnnnnnnnnnnnnnnnnnnnnnnnnnnnnnnnnnnnnnnnnnnnnnnnnnnnnnnnnnnnnnnnnnnnnnnnnnnnnnnnnnnnnnnnnnnnnnnnnnnnnnnnnnnnnnnnnnnnnnnnnnnnnnnnnnnnnnnnnnnnnnnnnnnnnnnnnnnnnnnnnnnnnnnnnnnnnnnnnnnnnnnnnnnnnnnnnnnnnnnnnnnnnnnnnnnnnnnnnnnnnnnnnnnnnnnnnnnnnnnnnnnnnnnnnnnnnnnnnnnnnnnnnnnnnnnnnnnnnnnnnnnnnnnnnnnnnnnnnnnnnnnnnnnnnnnnnnnnnnnnnnnnnnnnnnnnnnnnnnnnnnnnnnnnnnnnnnnnnnnnnnnnnnnnnnnnnnnnnnnnnnnnnnnnnnnnnnnnnnnnnnnnnnnnnnnnnnnnnnnnnnnnnnnnnnnnnnnnnnnnnnnnnnnnnnnnnnnnnnnnnnnnnnnnnnnnnnnnnnnnnnnnnnnnnnnnnnnnnnnnnnnnnnnnnnnnnnnnnnnnnnnnnnnnnnnnnnnnnnnnnnnnnnnnnnnnnnnnnnnnnnnnnnnnnnnnnnnnnnnnnnnnnnnnnnnnnnnnnnnnnnnnnnnnnnnnnnnnnnnnnnnnnnnnnnnnnnnnnnnnnnnnnnnnnnnnnnnnnnnnnnnnnnnnnnnnnnnnnnnnnnnnnnnnnnnnnnnnnnnnnnnnnnnnnnnnnnnnnnnnnnnnnnnnnnnnnnnnnnnnnnnnnnnnnnnnnnnnnnnnnnnnnnnnnnnnnnnnnnnnnnnnnnnnnnnnnnnnnnnnnnnnnnnnnnnnnnnnnnnnnnnnnnnnnnnnnnnnnnnnnnnnnnnnnnnnnnnnnnnnnnnnnnnnnnnnnnnnnnnnnnnnnnnnnnnnnnnnnnnnnnnnnnnnnnnnnnnnnnnnnnnnnnnnnnnnnnnnnnnnnnnnnnnnnnnnnnnnnnnnnnnnnnnnnnnnnnnnnnnnnnnnnnnnnnnnnnnnnnnnnnnnnnnnnnnnnnnnnnnnnnnnnnnnnnnnnnnnnnnnnnnnnnnnnnnnnnnnnnnnnnnnnnnnnnnnnnnnnnnnnnnnnnnnnnnnnnnnnnnnnnnnnnnnnnnnnnnnnnnnnnnnnnnnnnnnnnnnnnnnnnnnnnnnnnnnnnnnnnnnnnnnnnnnnnnnnnnnnnnnnnnnnnnnnnnnnnnnnnnnnnnnnnnnnnnnnnnnnnnnnnnnnnnnnnnnnnnnnnnnnnnnnnnnnnnnnnnnnnnnnnnnnnnnnnnnnnnnnnnnnnnnnnnnnnnnnnnnnnnnnnnnnnnnnnnnnnnnnnnnnnnnnnnnnnnnnnnnnnnnnnnnnnnnnnnnnnnnnnnnnnnnnnnnnnnnnnnnnnnnnnnnnnnnnnnnnnnnnnnnnnnnnnnnnnnnnnnnnnnnnnnnnnnnnnnnnnnnnnnnnnnnnnnnnnnnnnnnnnnnnnnnnnnnnnnnnnnnnnnnnnnnnnnnnnnnnnnnnnnnnnnnnnnnnnnnnnnnnnnnnnnnnnnnnnnnnnnnnnnnnnnnnnnnnnnnnnnnnnnnnnnnnnnnnnnnnnnnnnnnnnnnnnnnnnnnnnnnnnnnnnnnnnnnnnnnnnnnnnnnnnnnnnnnnnnnnnnnnnnnnnnnnnnnnnnnnnnnnnnnnnnnnnnnnnnnnnnnnnnnnnnnnnnnnnnnnnnnnnnnnnnnnnnnnnnnnnnnnnnnnnnnnnnnnnnnnnnnnnnnnnnnnnnnnnnnnnnnnnnnnnnnnnnnnnnnnnnnnnnnnnnnnnnnnnnnnnnnnnnnnnnnnnnnnnnnnnnnnnnnnnnnnnnnnnnnnnnnnnnnnnnnnnnnnnnnnnnnnnnnnnnnnnnnnnnnnnnnnnnnnnnnnnnnnnnnnnnnnnnnnnnnnnnnnnnnnnnnnnnnnnnnnnnnnnnnnnnnnnnnnnnnnnnnnnnnnnnnnnnnnnnnnnnnnnnnnnnnnnnnnnnnnnnnnnnnnnnnnnnnnnnnnnnnnnnnnnnnnnnnnnnnnnnnnnnnnnnnnnnnnnnnnnnnnnnnnnnnnnnnnnnnnnnnnnnnnnnnnnnnnnnnnnnnnnnnnnnnnnnnnnnnnnnnnnnnnnnnnnnnnnnnnnnnnnnnnnnnnnnnnnnnnnnnnnnnnnnnnnnnnnnnnnnnnnnnnnnnnnnnnnnnnnnnnnnnnnnnnnnnnnnnnnnnnnnnnnnnnnnnnnnnnnnnnnnnnnnnnnnnnnnnnnnnnnnnnnnnnnnnnnnnnnnnnnnnnnnnnnnnnnnnnnnnnnnnnnnnnnnnnnnnnnnnnnnnnnnnnnnnnnnnnnnnnnnnnnnnnnnnnnnnnnnnnnnnnnnnnnnnnnnnnnnnnnnnnnnnnnnnnnnnnnnnnnnnnnnnnnnnnnnnnnnnnnnnnnnnnnnnnnnnnnnnnnnnnnnnnnnnnnnnnnnnnnnnnnnnnnnnnnnnnnnnnnnnnnnnnnnnnnnnnnnnnnnnnnnnnnnnnnnnnnnnnnnnnnnnnnnnnnnnnnnnnnnnnnnnnnnnnnnnnnnnnnnnnnnnnnnnnnnnnnnnnnnnnnnnnnnnnnnnnnnnnnnnnnnnnnnnnnnnnnnnnnnnnnnnnnnnnnnnnnnnnnnnnnnnnnnnnnnnnnnnnnnnnnnnnnnnnnnnnnnnnnnnnnnnnnnnnnnnnnnnnnnnnnnnnnnnnnnnnnnnnnnnnnnnnnnnnnnnnnnnnnnnnnnnnnnnnnnnnnnnnnnnnnnnnnnnnnnnnnnnnnnnnnnnnnnnnnnnnnnnnnnnnnnnnnnnnnnnnnnnnnnnnnnnnnnnnnnnnnnnnnnnnnnnnnnnnnnnnnnnnnnnnnnnnnnnnnnnnnnnnnnnnnnnnnnnnnnnnnnnnnnnnnnnnnnnnnnnnnnnnnnnnnnnnnnnnnnnnnnnnnnnnnnnnnnnnnnnnnnnnnnnnnnnnnnnnnnnnnnnnnnnnnnnnnnnnnnnnnnnnnnnnnnnnnnnnnnnnnnnnnnnnnnnnnnnnnnnnnnnnnnnnnnnnnnnnnnnnnnnnnnnnnnnnnnnnnnnnnnnnnnnnnnnnnnnnnnnnnnnnnnnnnnnnnnnnnnnnnnnnnnnnnnnnnnnnnnnnnnnnnnnnnnnnnnnnnnnnnnnnnnnnnnnnnnnnnnnnnnnnnnnnnnnnnnnnnnnnnnnnnnnnnnnnnnnnnnnnnnnnnnnnnnnnnnnnnnnnnnnnnnnnnnnnnnnnnnnnnnnnnnnnnnnnnnnnnnnnnnnnnnnnnnnnnnnnnnnnnnnnnnnnnnnnnnnnnnnnnnnnnnnnnnnnnnnnnnnnnnnnnnnnnnnnnnnnnnnnnnnnnnnnnnnnnnnnnnnnnnnnnnnnnnnnnnnnnnnnnnnnnnnnnnnnnnnnnnnnnnnnnnnnnnnnnnnnnnnnnnnnnnnnnnnnnnnnnnnnnnnnnnnnnnnnnnnnnnnnnnnnnnnnnnnnnnnnnnnnnnnnnnnnnnnnnnnnnnnnnnnnnnnnnnnnnnnnnnnnnnnnnnnnnnnnnnnnnnnnnnnnnnnnnnnnnnnnnnnnnnnnnnnnnnnnnnnnnnnnnnnnnnnnnnnnnnnnnnnnnnnnnnnnnnnnnnnnnnnnnnnnnnnnnnnnnnnnnnnnnnnnnnnnnnnnnnnnnnnnnnnnnnnnnnnnnnnnnnnnnnnnnnnnnnnnnnnnnnnnnnnnnnnnnnnnnnnnnnnnnnnnnnnnnnnnnnnnnnnnnnnnnnnnnnnnnnnnnnnnnnnnnnnnnnnnnnnnnnnnnnnnnnnnnnnnnnnnnnnnnnnnnnnnnnnnnnnnnnnnnnnnnnnnnnnnnnnnnnnnnnnnnnnnnnnnnnnnnnnnnnnnnnnnnnnnnnnnnnnnnnnnnnnnnnnnnnnnnnnnnnnnnnnnnnnnnnnnnnnnnnnnnnnnnnnnnnnnnnnnnnnnnnnnnnnnnnnnnnnnnnnnnnnnnnnnnnnnnnnnnnnnnnnnnnnnnnnnnnnnnnnnnnnnnnnnnnnnnnnnnnnnnnnnnnnnnnnnnnnnnnnnnnnnnnnnnnnnnnnnnnnnnnnnnnnnnnnnnnnnnnnnnnnnnnnnnnnnnnnnnnnnnnnnnnnnnnnnnnnnnnnnnnnnnnnnnnnnnnnnnnnnnnnnnnnnnnnnnnnnnnnnnnnnnnnnnnnnnnnnnnnnnnnnnnnnnnnnnnnnnnnnnnnnnnnnnnnnnnnnnnnnnnnnnnnnnnnnnnnnnnnnnnnnnnnnnnnnnnnnnnnnnnnnnnnnnnnnnnnnnnnnnnnnnnnnnnnnnnnnnnnnnnnnnnnnnnnnnnnnnnnnnnnnnnnnnnnnnnnnnnnnnnnnnnnnnnnnnnnnnnnnnnnnnnnnnnnnnnnnnnnnnnnnnnnnnnnnnnnnnnnnnnnnnnnnnnnnnnnnnnnnnnnnnnnnnnnnnnnnnnnnnnnnnnnnnnnnnnnnnnnnnnnnnnnnnnnnnnnnnnnnnnnnnnnnnnnnnnnnnnnnnnnnnnnnnnnnnnnnnnnnnnnnnnnnnnnnnnnnnnnnnnnnnnnnnnnnnnnnnnnnnnnnnnnnnnnnnnnnnnnnnnnnnnnnnnnnnnnnnnnnnnnnnnnnnnnnnnnnnnnnnnnnnnnnnnnnnnnnnnnnnnnnnnnnnnnnnnnnnnnnnnnnnnnnnnnnnnnnnnnnnnnnnnnnnnnnnnnnnnnnnnnnnnnnnnnnnnnnnnnnnnnnnnnnnnnnnnnnnnnnnnnnnnnnnnnnnnnnnnnnnnnnnnnnnnnnnnnnnnnnnnnnnnnnnnnnnnnnnnnnnnnnnnnnnnnnnnnnnnnnnnnnnnnnnnnnnnnnnnnnnnnnnnnnnnnnnnnnnnnnnnnnnnnnnnnnnnnnnnnnnnnnnnnnnnnnnnnnnnnnnnnnnnnnnnnnnnnnnnnnnnnnnnnnnnnnnnnnnnnnnnnnnnnnnnnnnnnnnnnnnnnnnnnnnnnnnnnnnnnnnnnnnnnnnnnnnnnnnnnnnnnnnnnnnnnnnnnnnnnnnnnnnnnnnnnnnnnnnnnnnnnnnnnnnnnnnnnnnnnnnnnnnnnnnnnnnnnnnnnnnnnnnnnnnnnnnnnnnnnnnnnnnnnnnnnnnnnnnnnnnnnnnnnnnnnnnnnnnnnnnnnnnnnnnnnnnnnnnnnnnnnnnnnnnnnnnnnnnnnnnnnnnnnnnnnnnnnnnnnnnnnnnnnnnnnnnnnnnnnnnnnnnnnnnnnnnnnnnnnnnnnnnnnnnnnnnnnnnnnnnnnnnnnnnnnnnnnnnnnnnnnnnnnnnnnnnnnnnnnnnnnnnnnnnnnnnnnnnnnnnnnnnnnnnnnnnnnnnnnnnnnnnnnnnnnnnnnnnnnnnnnnnnnnnnnnnnnnnnnnnnnnnnnnnnnnnnnnnnnnnnnnnnnnnnnnnnnnnnnnnnnnnnnnnnnnnnnnnnnnnnnnnnnnnnnnnnnnnnnnnnnnnnnnnnnnnnnnnnnnnnnnnnnnnnnnnnnnnnnnnnnnnnnnnnnnnnnnnnnnnnnnnnnnnnnnnnnnnnnnnnnnnnnnnnnnnnnnnnnnnnnnnnnnnnnnnnnnnnnnnnnnnnnnnnnnnnnnnnnnnnnnnnnnnnnnnnnnnnnnnnnnnnnnnnnnnnnnnnnnnnnnnnnnnnnnnnnnnnnnnnnnnnnnnnnnnnnnnnnnnnnnnnnnnnnnnnnnnnnnnnnnnnnnnnnnnnnnnnnnnnnnnnnnnnnnnnnnnnnnnnnnnnnnnnnnnnnnnnnnnnnnnnnnnnnnnnnnnnnnnnnnnnnnnnnnnnnnnnnnnnnnnnnnnnnnnnnnnnnnnnnnnnnnnnnnnnnnnnnnnnnnnnnnnnnnnnnnnnnnnnnnnnnnnnnnnnnnnnnnnnnnnnnnnnnnnnnnnnnnnnnnnnnnnnnnnnnnnnnnnnnnnnnnnnnnnnnnnnnnnnnnnnnnnnnnnnnnnnnnnnnnnnnnnnnnnnnnnnnnnnnnnnnnnnnnnnnnnnnnnnnnnnnnnnnnnnnnnnnnnnnnnnnnnnnnnnnnnnnnnnnnnnnnnnnnnnnnnnnnnnnnnnnnnnnnnnnnnnnnnnnnnnnnnnnnnnnnnnnnnnnnnnnnnnnnnnnnnnnnnnnnnnnnnnnnnnnnnnnnnnnnnnnnnnnnnnnnnnnnnnnnnnnnnnnnnnnnnnnnnnnnnnnnnnnnnnnnnnnnnnnnnnnnnnnnnnnnnnnnnnnnnnnnnnnnnnnnnnnnnnnnnnnnnnnnnnnnnnnnnnnnnnnnnnnnnnnnnnnnnnnnnnnnnnnnnnnnnnnnnnnnnnnnnnnnnnnnnnnnnnnnnnnnnnnnnnnnnnnnnnnnnnnnnnnnnnnnnnnnnnnnnnnnnnnnnnnnnnnnnnnnnnnnnnnnnnnnnnnnnnnnnnnnnnnnnnnnnnnnnnnnnnnnnnnnnnnnnnnnnnnnnnnnnnnnnnnnnnnnnnnnnnnnnnnnnnnnnnnnnnnnnnnnnnnnnnnnnnnnnnnnnnnnnnnnnnnnnnnnnnnnnnnnnnnnnnnnnnnnnnnnnnnnnnnnnnnnnnnnnnnnnnnnnnnnnnnnnnnnnnnnnnnnnnnnnnnnnnnnnnnnnnnnnnnnnnnnnnnnnnnnnnnnnnnnnnnnnnnnnnnnnnnnnnnnnnnnnnnnnnnnnnnnnnnnnnnnnnnnnnnnnnnnnnnnnnnnnnnnnnnnnnnnnnnnnnnnnnnnnnnnnnnnnnnnnnnnnnnnnnnnnnnnnnnnnnnnnnnnnnnnnnnnnnnnnnnnnnnnnnnnnnnnnnnnnnnnnnnnnnnnnnnnnnnnnnnnnnnnnnnnnnnnnnnnnnnnnnnnnnnnnnnnnnnnnnnnnnnnnnnnnnnnnnnnnnnnnnnnnnnnnnnnnnnnnnnnnnnnnnnnnnnnnnnnnnnnnnnnnnnnnnnnnnnnnnnnnnnnnnnnnnnnnnnnnnnnnnnnnnnnnnnnnnnnnnnnnnnnnnnnnnnnnnnnnnnnnnnnnnnnnnnnnnnnnnnnnnnnnnnnnnnnnnnnnnnnnnnnnnnnnnnnnnnnnnnnnnnnnnnnnnnnnnnnnnnnnnnnnnnnnnnnnnnnnnnnnnnnnnnnnnnnnnnnnnnnnnnnnnnnnnnnnnnnnnnnnnnnnnnnnnnnnnnnnnnnnnnnnnnnnnnnnnnnnnnnnnnnnnnnnnnnnnnnnnnnnnnnnnnnnnnnnnnnnnnnnnnnnnnnnnnnnnnnnnnnnnnnnnnnnnnnnnnnnnnnnnnnnnnnnnnnnnnnnnnnnnnnnnnnnnnnnnnnnnnnnnnnnnnnnnnnnnnnnnnnnnnnnnnnnnnnnnnnnnnnnnnnnnnnnnnnnnnnnnnnnnnnnnnnnnnnnnnnnnnnnnnnnnnnnnnnnnnnnnnnnnnnnnnnnnnnnnnnnnnnnnnnnnnnnnnnnnnnnnnnnnnnnnnnnnnnnnnnnnnnnnnnnnnnnnnnnnnnnnnnnnnnnnnnnnnnnnnnnnnnnnnnnnnnnnnnnnnnnnnnnnnnnnnnnnnnnnnnnnnnnnnnnnnnnnnnnnnnnnnnnnnnnnnnnnnnnnnnnnnnnnnnnnnnnnnnnnnnnnnnnnnnnnnnnnnnnnnnnnnnnnnnnnnnnnnnnnnnnnnnnnnnnnnnnnnnnnnnnnnnnnnnnnnnnnnnnnnnnnnnnnnnnnnnnnnnnnnnnnnnnnnnnnnnnnnnnnnnnnnnnnnnnnnnnnnnnnnnnnnnnnnnnnnnnnnnnnnnnnnnnnnnnnnnnnnnnnnnnnnnnnnnnnnnnnnnnnnnnnnnnnnnnnnnnnnnnnnnnnnnnnnnnnnnnnnnnnnnnnnnnnnnnnnnnnnnnnnnnnnnnnnnnnnnnnnnnnnnnnnnnnnnnnnnnnnnnnnnnnnnnnnnnnnnnnnnnnnnnnnnnnnnnnnnnnnnnnnnnnnnnnnnnnnnnnnnnnnnnnnnnnnnnnnnnnnnnnnnnnnnnnnnnnnnnnnnnnnnnnnnnnnnnnnnnnnnnnnnnnnnnnnnnnnnnnnnnnnnnnnnnnnnnnnnnnnnnnnnnnnnnnnnnnnnnnnnnnnnnnnnnnnnnnnnnnnnnnnnnnnnnnnnnnnnnnnnnnnnnnnnnnnnnnnnnnnnnnnnnnnnnnnnnnnnnnnnnnnnnnnnnnnnnnnnnnnnnnnnnnnnnnnnnnnnnnnnnnnnnnnnnnnnnnnnnnnnnnnnnnnnnnnnnnnnnnnnnnnnnnnnnnnnnnnnnnnnnnnnnnnnnnnnnnnnnnnnnnnnnnnnnnnnnnnnnnnnnnnnnnnnnnnnnnnnnnnnnnnnnnnnnnnnnnnnnnnnnnnnnnnnnnnnnnnnnnnnnnnnnnnnnnnnnnnnnnnnnnnnnnnnnnnnnnnnnnnnnnnnnnnnnnnnnnnnnnnnnnnnnnnnnnnnnnnnnnnnnnnnnnnnnnnnnnnnnnnnnnnnnnnnnnnnnnnnnnnnnnnnnnnnnnnnnnnnnnnnnnnnnnnnnnnnnnnnnnnnnnnnnnnnnnnnnnnnnnnnnnnnnnnnnnnnnnnnnnnnnnnnnnnnnnnnnnnnnnnnnnnnnnnnnnnnnnnnnnnnnnnnnnnnnnnnnnnnnnnnnnnnnnnnnnnnnnnnnnnnnnnnnnnnnnnnnnnnnnnnnnnnnnnnnnnnnnnnnnnnnnnnnnnnnnnnnnnnnnnnnnnnnnnnnnnnnnnnnnnnnnnnnnnnnnnnnnnnnnnnnnnnnnnnnnnnnnnnnnnnnnnnnnnnnnnnnnnnnnnnnnnnnnnnnnnnnnnnnnnnnnnnnnnnnnnnnnnnnnnnnnnnnnnnnnnnnnnnnnnnnnnnnnnnnnnnnnnnnnnnnnnnnnnnnnnnnnnnnnnnnnnnnnnnnnnnnnnnnnnnnnnnnnnnnnnnnnnnnnnnnnnnnnnnnnnnnnnnnnnnnnnnnnnnnnnnnnnnnnnnnnnnnnnnnnnnnnnnnnnnnnnnnnnnnnnnnnnnnnnnnnnnnnnnnnnnnnnnnnnnnnnnnnnnnnnnnnnnnnnnnnnnnnnnnnnnnnnnnnnnnnnnnnnnnnnnnnnnnnnnnnnnnnnnnnnnnnnnnnnnnnnnnnnnnnnnnnnnnnnnnnnnnnnnnnnnnnnnnnnnnnnnnnnnnnnnnnnnnnnnnnnnnnnnnnnnnnnnnnnnnnnnnnnnnnnnnnnnnnnnnnnnnnnnnnnnnnnnnnnnnnnnnnnnnnnnnnnnnnnnnnnnnnnnnnnnnnnnnnnnnnnnnnnnnnnnnnnnnnnnnnnnnnnnnnnnnnnnnnnnnnnnnnnnnnnnnnnnnnnnnnnnnnnnnnnnnnnnnnnnnnnnnnnnnnnnnnnnnnnnnnnnnnnnnnnnnnnnnnnnnnnnnnnnnnnnnnnnnnnnnnnnnnnnnnnnnnnnnnnnnnnnnnnnnnnnnnnnnnnnnnnnnnnnnnnnnnnnnnnnnnnnnnnnnnnnnnnnnnnnnnnnnnnnnnnnnnnnnnnnnnnnnnnnnnnnnnnnnnnnnnnnnnnnnnnnnnnnnnnnnnnnnnnnnnnnnnnnnnnnnnnnnnnnnnnnnnnnnnnnnnnnnnnnnnnnnnnnnnnnnnnnnnnnnnnnnnnnnnnnnnnnnnnnnnnnnnnnnnnnnnnnnnnnnnnnnnnnnnnnnnnnnnnnnnnnnnnnnnnnnnnnnnnnnnnnnnnnnnnnnnnnnnnnnnnnnnnnnnnnnnnnnnnnnnnnnnnnnnnnnnnnnnnnnnnnnnnnnnnnnnnnnnnnnnnnnnnnnnnnnnnnnnnnnnnnnnnnnnnnnnnnnnnnnnnnnnnnnnnnnnnnnnnnnnnnnnnnnnnnnnnnnnnnnnnnnnnnnnnnnnnnnnnnnnnnnnnnnnnnnnnnnnnnnnnnnnnnnnnnnnnnnnnnnnnnnnnnnnnnnnnnnnnnnnnnnnnnnnnnnnnnnnnnnnnnnnnnnnnnnnnnnnnnnnnnnnnnnnnnnnnnnnnnnnnnnnnnnnnnnnnnnnnnnnnnnnnnnnnnnnnnnnnnnnnnnnnnnnnnnnnnnnnnnnnnnnnnnnnnnnnnnnnnnnnnnnnnnnnnnnnnnnnnnnnnnnnnnnnnnnnnnnnnnnnnnnnnnnnnnnnnnnnnnnnnnnnnnnnnnnnnnnnnnnnnnnnnnnnnnnnnnnnnnnnnnnnnnnnnnnnnnnnnnnnnnnnnnnnnnnnnnnnnnnnnnnnnnnnnnnnnnnnnnnnnnnnnnnnnnnnnnnnnnnnnnnnnnnnnnnnnnnnnnnnnnnnnnnnnnnnnnnnnnnnnnnnnnnnnnnnnnnnnnnnnnnnnnnnnnnnnnnnnnnnnnnnnnnnnnnnnnnnnnnnnnnnnnnnnnnnnnnnnnnnnnnnnnnnnnnnnnnnnnnnnnnnnnnnnnnnnnnnnnnnnnnnnnnnnnnnnnnnnnnnnnnnnnnnnnnnnnnnnnnnnnnnnnnnnnnnnnnnnnnnnnnnnnnnnnnnnnnnnnnnnnnnnnnnnnnnnnnnnnnnnnnnnnnnnnnnnnnnnnnnnnnnnnnnnnnnnnnnnnnnnnnnnnnnnnnnnnnnnnnnnnnnnnnnnnnnnnnnnnnnnnnnnnnnnnnnnnnnnnnnnnnnnnnnnnnnnnnnnnnnnnnnnnnnnnnnnnnnnnnnnnnnnnnnnnnnnnnnnnnnnnnnnnnnnnnnnnnnnnnnnnnnnnnnnnnnnnnnnnnnnnnnnnnnnnnnnnnnnnnnnnnnnnnnnnnnnnnnnnnnnnnnnnnnnnnnnnnnnnnnnnnnnnnnnnnnnnnnnnnnnnnnnnnnnnnnnnnnnnnnnnnnnnnnnnnnnnnnnnnnnnnnnnnnnnnnnnnnnnnnnnnnnnnnnnnnnnnnnnnnnnnnnnnnnnnnnnnnnnnnnnnnnnnnnnnnnnnnnnnnnnnnnnnnnnnnnnnnnnnnnnnnnnnnnnnnnnnnnnnnnnnnnnnnnnnnnnnnnnnnnnnnnnnnnnnnnnnnnnnnnnnnnnnnnnnnnnnnnnnnnnnnnnnnnnnnnnnnnnnnnnnnnnnnnnnnnnnnnnnnnnnnnnnnnnnnnnnnnnnnnnnnnnnnnnnnnnnnnnnnnnnnnnnnnnnnnnnnnnnnnnnnnnnnnnnnnnnnnnnnnnnnnnnnnnnnnnnnnnnnnnnnnnnnnnnnnnnnnnnnnnnnnnnnnnnnnnnnnnnnnnnnnnnnnnnnnnnnnnnnnnnnnnnnnnnnnnnnnnnnnnnnnnnnnnnnnnnnnnnnnnnnnnnnnnnnnnnnnnnnnnnnnnnnnnnnnnnnnnnnnnnnnnnnnnnnnnnnnnnnnnnnnnnnnnnnnnnnnnnnnnnnnnnnnnnnnnnnnnnnnnnnnnnnnnnnnnnnnnnnnnnnnnnnnnnnnnnnnnnnnnnnnnnnnnnnnnnnnnnnnnnnnnnnnnnnnnnnnnnnnnnnnnnnnnnnnnnnnnnnnnnnnnnnnnnnnnnnnnnnnnnnnnnnnnnnnnnnnnnnnnnnnnnnnnnnnnnnnnnnnnnnnnnnnnnnnnnnnnnnnnnnnnnnnnnnnnnnnnnnnnnnnnnnnnnnnnnnnnnnnnnnnnnnnnnnnnnnnnnnnnnnnnnnnnnnnnnnnnnnnnnnnnnnnnnnnnnnnnnnnnnnnnnnnnnnnnnnnnnnnnnnnnnnnnnnnnnnnnnnnnnnnnnnnnnnnnnnnnnnnnnnnnnnnnnnnnnnnnnnnnnnnnnnnnnnnnnnnnnnnnnnnnnnnnnnnnnnnnnnnnnnnnnnnnnnnnnnnnnnnnnnnnnnnnnnnnnnnnnnnnnnnnnnnnnnnnnnnnnnnnnnnnnnnnnnnnnnnnnnnnnnnnnnnnnnnnnnnnnnnnnnnnnnnnnnnnnnnnnnnnnnnnnnnnnnnnnnnnnnnnnnnnnnnnnnnnnnnnnnnnnnnnnnnnnnnnnnnnnnnnnnnnnnnnnnnnnnnnnnnnnnnnnnnnnnnnnnnnnnnnnnnnnnnnnnnnnnnnnnnnnnnnnnnnnnnnnnnnnnnnnnnnnnnnnnnnnnnnnnnnnnnnnnnnnnnnnnnnnnnnnnnnnnnnnnnnnnnnnnnnnnnnnnnnnnnnnnnnnnnnnnnnnnnnnnnnnnnnnnnnnnnnnnnnnnnnnnnnnnnnnnnnnnnnnnnnnnnnnnnnnnnnnnnnnnnnnnnnnnnnnnnnnnnnnnnnnnnnnnnnnnnnnnnnnnnnnnnnnnnnnnnnnnnnnnnnnnnnnnnnnnnnnnnnnnnnnnnnnnnnnnnnnnnnnnnnnnnnnnnnnnnnnnnnnnnnnnnnnnnnnnnnnnnnnnnnnnnnnnnnnnnnnnnnnnnnnnnnnnnnnnnnnnnnnnnnnnnnnnnnnnnnnnnnnnnnnnnnnnnnnnnnnnnnnnnnnnnnnnnnnnnnnnnnnnnnnnnnnnnnnnnnnnnnnnnnnnnnnnnnnnnnnnnnnnnnnnnnnnnnnnnnnnnnnnnnnnnnnnnnnnnnnnnnnnnnnnnnnnnnnnnnnnnnnnnnnnnnnnnnnnnnnnnnnnnnnnnnnnnnnnnnnnnnnnnnnnnnnnnnnnnnnnnnnnnnnnnnnnnnnnnnnnnnnnnnnnnnnnnnnnnnnnnnnnnnnnnnnnnnnnnnnnnnnnnnnnnnnnnnnnnnnnnnnnnnnnnnnnnnnnnnnnnnnnnnnnnnnnnnnnnnnnnnnnnnnnnnnnnnnnnnnnnnnnnnnnnnnnnnnnnnnnnnnnnnnnnnnnnnnnnnnnnnnnnnnnnnnnnnnnnnnnnnnnnnnnnnnnnnnnnnnnnnnnnnnnnnnnnnnnnnnnnnnnnnnnnnnnnnnnnnnnnnnnnnnnnnnnnnnnnnnnnnnnnnnnnnnnnnnnnnnnnnnnnnnnnnnnnnnnnnnnnnnnnnnnnnnnnnnnnnnnnnnnnnnnnnnnnnnnnnnnnnnnnnnnnnnnnnnnnnnnnnnnnnnnnnnnnnnnnnnnnnnnnnnnnnnnnnnnnnnnnnnnnnnnnnnnnnnnnnnnnnnnnnnnnnnnnnnnnnnnnnnnnnnnnnnnnnnnnnnnnnnnnnnnnnnnnnnnnnnnnnnnnnnnnnnnnnnnnnnnnnnnnnnnnnnnnnnnnnnnnnnnnnnnnnnnnnnnnnnnnnnnnnnnnnnnnnnnnnnnnnnnnnnnnnnnnnnnnnnnnnnnnnnnnnnnnnnnnnnnnnnnnnnnnnnnnnnnnnnnnnnnnnnnnnnnnnnnnnnnnnnnnnnnnnnnnnnnnnnnnnnnnnnnnnnnnnnnnnnnnnnnnnnnnnnnnnnnnnnnnnnnnnnnnnnnnnnnnnnnnnnnnnnnnnnnnnnnnnnnnnnnnnnnnnnnnnnnnnnnnnnnnnnnnnnnnnnnnnnnnnnnnnnnnnnnnnnnnnnnnnnnnnnnnnnnnnnnnnnnnnnnnnnnnnnnnnnnnnnnnnnnnnnnnnnnnnnnnnnnnnnnnnnnnnnnnnnnnnnnnnnnnnnnnnnnnnnnnnnnnnnnnnnnnnnnnnnnnnnnnnnnnnnnnnnnnnnnnnnnnnnnnnnnnnnnnnnnnnnnnnnnnnnnnnnnnnnnnnnnnnnnnnnnnnnnnnnnnnnnnnnnnnnnnnnnnnnnnnnnnnnnnnnnnnnnnnnnnnnnnnnnnnnnnnnnnnnnnnnnnnnnnnnnnnnnnnnnnnnnnnnnnnnnnnnnnnnnnnnnnnnnnnnnnnnnnnnnnnnnnnnnnnnnnnnnnnnnnnnnnnnnnnnnnnnnnnnnnnnnnnnnnnnnnnnnnnnnnnnnnnnnnnnnnnnnnnnnnnnnnnnnnnnnnnnnnnnnnnnnnnnnnnnnnnnnnnnnnnnnnnnnnnnnnnnnnnnnnnnnnnnnnnnnnnnnnnnnnnnnnnnnnnnnnnnnnnnnnnnnnnnnnnnnnnnnnnnnnnnnnnnnnnnnnnnnnnnnnnnnnnnnnnnnnnnnnnnnnnnnnnnnnnnnnnnnnnnnnnnnnnnnnnnnnnnnnnnnnnnnnnnnnnnnnnnnnnnnnnnnnnnnnnnnnnnnnnnnnnnnnnnnnnnnnnnnnnnnnnnnnnnnnnnnnnnnnnnnnnnnnnnnnnnnnnnnnnnnnnnnnnnnnnnnnnnnnnnnnnnnnnnnnnnnnnnnnnnnnnnnnnnnnnnnnnnnnnnnnnnnnnnnnnnnnnnnnnnnnnnnnnnnnnnnnnnnnnnnnnnnnnnnnnnnnnnnnnnnnnnnnnnnnnnnnnnnnnnnnnnnnnnnnnnnnnnnnnnnnnnnnnnnnnnnnnnnnnnnnnnnnnnnnnnnnnnnnnnnnnnnnnnnnnnnnnnnnnnnnnnnnnnnnnnnnnnnnnnnnnnnnnnnnnnnnnnnnnnnnnnnnnnnnnnnnnnnnnnnnnnnnnnnnnnnnnnnnnnnnnnnnnnnnnnnnnnnnnnnnnnnnnnnnnnnnnnnnnnnnnnnnnnnnnnnnnnnnnnnnnnnnnnnnnnnnnnnnnnnnnnnnnnnnnnnnnnnnnnnnnnnnnnnnnnnnnnnnnnnnnnnnnnnnnnnnnnnnnnnnnnnnnnnnnnnnnnnnnnnnnnnnnnnnnnnnnnnnnnnnnnnnnnnnnnnnnnnnnnnnnnnnnnnnnnnnnnnnnnnnnnnnnnnnnnnnnnnnnnnnnnnnnnnnnnnnnnnnnnnnnnnnnnnnnnnnnnnnnnnnnnnnnnnnnnnnnnnnnnnnnnnnnnnnnnnnnnnnnnnnnnnnnnnnnnnnnnnnnnnnnnnnnnnnnnnnnnnnnnnnnnnnnnnnnnnnnnnnnnnnnnnnnnnnnnnnnnnnnnnnnnnnnnnnnnnnnnnnnnnnnnnnnnnnnnnnnnnnnnnnnnnnnnnnnnnnnnnnnnnnnnnnnnnnnnnnnnnnnnnnnnnnnnnnnnnnnnnnnnnnnnnnnnnnnnnnnnnnnnnnnnnnnnnnnnnnnnnnnnnnnnnnnnnnnnnnnnnnnnnnnnnnnnnnnnnnnnnnnnnnnnnnnnnnnnnnnnnnnnnnnnnnnnnnnnnnnnnnnnnnnnnnnnnnnnnnnnnnnnnnnnnnnnnnnnnnnnnnnnnnnnnnnnnnnnnnnnnnnnnnnnnnnnnnnnnnnnnnnnnnnnnnnnnnnnnnnnnnnnnnnnnnnnnnnnnnnnnnnnnnnnnnnnnnnnnnnnnnnnnnnnnnnnnnnnnnnnnnnnnnnnnnnnnnnnnnnnnnnnnnnnnnnnnnnnnnnnnnnnnnnnnnnnnnnnnnnnnnnnnnnnnnnnnnnnnnnnnnnnnnnnnnnnnnnnnnnnnnnnnnnnnnnnnnnnnnnnnnnnnnnnnnnnnnnnnnnnnnnnnnnnnnnnnnnnnnnnnnnnnnnnnnnnnnnnnnnnnnnnnnnnnnnnnnnnnnnnnnnnnnnnnnnnnnnnnnnnnnnnnnnnnnnnnnnnnnnnnnnnnnnnnnnnnnnnnnnnnnnnnnnnnnnnnnnnnnnnnnnnnnnnnnnnnnnnnnnnnnnnnnnnnnnnnnnnnnnnnnnnnnnnnnnnnnnnnnnnnnnnnnnnnnnnnnnnnnnnnnnnnnnnnnnnnnnnnnnnnnnnnnnnnnnnnnnnnnnnnnnnnnnnnnnnnnnnnnnnnnnnnnnnnnnnnnnnnnnnnnnnnnnnnnnnnnnnnnnnnnnnnnnnnnnnnnnnnnnnnnnnnnnnnnnnnnnnnnnnnnnnnnnnnnnnnnnnnnnnnnnnnnnnnnnnnnnnnnnnnnnnnnnnnnnnnnnnnnnnnnnnnnnnnnnnnnnnnnnnnnnnnnnnnnnnnnnnnnnnnnnnnnnnnnnnnnnnnnnnnnnnnnnnnnnnnnnnnnnnnnnnnnnnnnnnnnnnnnnnnnnnnnnnnnnnnnnnnnnnnnnnnnnnnnnnnnnnnnnnnnnnnnnnnnnnnnnnnnnnnnnnnnnnnnnnnnnnnnnnnnnnnnnnnnnnnnnnnnnnnnnnnnnnnnnnnnnnnnnnnnnnnnnnnnnnnnnnnnnnnnnnnnnnnnnnnnnnnnnnnnnnnnnnnnnnnnnnnnnnnnnnnnnnnnnnnnnnnnnnnnnnnnnnnnnnnnnnnnnnnnnnnnnnnnnnnnnnnnnnnnnnnnnnnnnnnnnnnnnnnnnnnnnnnnnnnnnnnnnnnnnnnnnnnnnnnnnnnnnnnnnnnnnnnnnnnnnnnnnnnnnnnnnnnnnnnnnnnnnnnnnnnnnnnnnnnnnnnnnnnnnnnnnnnnnnnnnnnnnnnnnnnnnnnnnnnnnnnnnnnnnnnnnnnnnnnnnnnnnnnnnnnnnnnnnnnnnnnnnnnnnnnnnnnnnnnnnnnnnnnnnnnnnnnnnnnnnnnnnnnnnnnnnnnnnnnnnnnnnnnnnnnnnnnnnnnnnnnnnnnnnnnnnnnnnnnnnnnnnnnnnnnnnnnnnnnnnnnnnnnnnnnnnnnnnnnnnnnnnnnnnnnnnnnnnnnnnnnnnnnnnnnnnnnnnnnnnnnnnnnnnnnnnnnnnnnnnnnnnnnnnnnnnnnnnnnnnnnnnnnnnnnnnnnnnnnnnnnnnnnnnnnnnnnnnnnnnnnnnnnnnnnnnnnnnnnnnnnnnnnnnnnnnnnnnnnnnnnnnnnnnnnnnnnnnnnnnnnnnnnnnnnnnnnnnnnnnnnnnnnnnnnnnnnnnnnnnnnnnnnnnnnnnnnnnnnnnnnnnnnnnnnnnnnnnnnnnnnnnnnnnnnnnnnnnnnnnnnnnnnnnnnnnnnnnnnnnnnnnnnnnnnnnnnnnnnnnnnnnnnnnnnnnnnnnnnnnnnnnnnnnnnnnnnnnnnnnnnnnnnnnnnnnnnnnnnnnnnnnnnnnnnnnnnnnnnnnnnnnnnnnnnnnnnnnnnnnnnnnnnnnnnnnnnnnnnnnnnnnnnnnnnnnnnnnnnnnnnnnnnnnnnnnnnnnnnnnnnnnnnnnnnnnnnnnnnnnnnnnnnnnnnnnnnnnnnnnnnnnnnnnnnnnnnnnnnnnnnnnnnnnnnnnnnnnnnnnnnnnnnnnnnnnnnnnnnnnnnnnnnnnnnnnnnnnnnnnnnnnnnnnnnnnnnnnnnnnnnnnnnnnnnnnnnnnnnnnnnnnnnnnnnnnnnnnnnnnnnnnnnnnnnnnnnnnnnnnnnnnnnnnnnnnnnnnnnnnnnnnnnnnnnnnnnnnnnnnnnnnnnnnnnnnnnnnnnnnnnnnnnnnnnnnnnnnnnnnnnnnnnnnnnnnnnnnnnnnnnnnnnnnnnnnnnnnnnnnnnnnnnnnnnnnnnnnnnnnnnnnnnnnnnnnnnnnnnnnnnnnnnnnnnnnnnnnnnnnnnnnnnnnnnnnnnnnnnnnnnnnnnnnnnnnnnnnnnnnnnnnnnnnnnnnnnnnnnnnnnnnnnnnnnnnnnnnnnnnnnnnnnnnnnnnnnnnnnnnnnnnnnnnnnnnnnnnnnnnnnnnnnnnnnnnnnnnnnnnnnnnnnnnnnnnnnnnnnnnnnnnnnnnnnnnnnnnnnnnnnnnnnnnnnnnnnnnnnnnnnnnnnnnnnnnnnnnnnnnnnnnnnnnnnnnnnnnnnnnnnnnnnnnnnnnnnnnnnnnnnnnnnnnnnnnnnnnnnnnnnnnnnnnnnnnnnnnnnnnnnnnnnnnnnnnnnnnnnnnnnnnnnnnnnnnnnnnnnnnnnnnnnnnnnnnnnnnnnnnnnnnnnnnnnnnnnnnnnnnnnnnnnnnnnnnnnnnnnnnnnnnnnnnnnnnnnnnnnnnnnnnnnnnnnnnnnnnnnnnnnnnnnnnnnnnnnnnnnnnnnnnnnnnnnnnnnnnnnnnnnnnnnnnnnnnnnnnnnnnnnnnnnnnnnnnnnnnnnnnnnnnnnnnnnnnnnnnnnnnnnnnnnnnnnnnnnnnnnnnnnnnnnnnnnnnnnnnnnnnnnnnnnnnnnnnnnnnnnnnnnnnnnnnnnnnnnnnnnnnnnnnnnnnnnnnnnnnnnnnnnnnnnnnnnnnnnnnnnnnnnnnnnnnnnnnnnnnnnnnnnnnnnnnnnnnnnnnnnnnnnnnnnnnnnnnnnnnnnnnnnnnnnnnnnnnnnnnnnnnnnnnnnnnnnnnnnnnnnnnnnnnnnnnnnnnnnnnnnnnnnnnnnnnnnnnnnnnnnnnnnnnnnnnnnnnnnnnnnnnnnnnnnnnnnnnnnnnnnnnnnnnnnnnnnnnnnnnnnnnnnnnnnnnnnnnnnnnnnnnnnnnnnnnnnnnnnnnnnnnnnnnnnnnnnnnnnnnnnnnnnnnnnnnnnnnnnnnnnnnnnnnnnnnnnnnnnnnnnnnnnnnnnnnnnnnnnnnnnnnnnnnnnnnnnnnnnnnnnnnnnnnnnnnnnnnnnnnnnnnnnnnnnnnnnnnnnnnnnnnnnnnnnnnnnnnnnnnnnnnnnnnnnnnnnnnnnnnnnnnnnnnnnnnnnnnnnnnnnnnnnnnnnnnnnnnnnnnnnnnnnnnnnnnnnnnnnnnnnnnnnnnnnnnnnnnnnnnnnnnnnnnnnnnnnnnnnnnnnnnnnnnnnnnnnnnnnnnnnnnnnnnnnnnnnnnnnnnnnnnnnnnnnnnnnnnnnnnnnnnnnnnnnnnnnnnnnnnnnnnnnnnnnnnnnnnnnnnnnnnnnnnnnnnnnnnnnnnnnnnnnnnnnnnnnnnnnnnnnnnnnnnnnnnnnnnnnnnnnnnnnnnnnnnnnnnnnnnnnnnnnnnnnnnnnnnnnnnnnnnnnnnnnnnnnnnnnnnnnnnnnnnnnnnnnnnnnnnnnnnnnnnnnnnnnnnnnnnnnnnnnnnnnnnnnnnnnnnnnnnnnnnnnnnnnnnnnnnnnnnnnnnnnnnnnnnnnnnnnnnnnnnnnnnnnnnnnnnnnnnnnnnnnnnnnnnnnnnnnnnnnnnnnnnnnnnnnnnnnnnnnnnnnnnnnnnnnnnnnnnnnnnnnnnnnnnnnnnnnnnnnnnnnnnnnnnnnnnnnnnnnnnnnnnnnnnnnnnnnnnnnnnnnnnnnnnnnnnnnnnnnnnnnnnnnnnnnnnnnnnnnnnnnnnnnnnnnnnnnnnnnnnnnnnnnnnnnnnnnnnnnnnnnnnnnnnnnnnnnnnnnnnnnnnnnnnnnnnnnnnnnnnnnnnnnnnnnnnnnnnnnnnnnnnnnnnnnnnnnnnnnnnnnnnnnnnnnnnnnnnnnnnnnnnnnnnnnnnnnnnnnnnnnnnnnnnnnnnnnnnnnnnnnnnnnnnnnnnnnnnnnnnnnnnnnnnnnnnnnnnnnnnnnnnnnnnnnnnnnnnnnnnnnnnnnnnnnnnnnnnnnnnnnnnnnnnnnnnnnnnnnnnnnnnnnnnnnnnnnnnnnnnnnnnnnnnnnnnnnnnnnnnnnnnnnnnnnnnnnnnnnnnnnnnnnnnnnnnnnnnnnnnnnnnnnnnnnnnnnnnnnnnnnnnnnnnnnnnnnnnnnnnnnnnnnnnnnnnnnnnnnnnnnnnnnnnnnnnnnnnnnnnnnnnnnnnnnnnnnnnnnnnnnnnnnnnnnnnnnnnnnnnnnnnnnnnnnnnnnnnnnnnnnnnnnnnnnnnnnnnnnnnnnnnnnnnnnnnnnnnnnnnnnnnnnnnnnnnnnnnnnnnnnnnnnnnnnnnnnnnnnnnnnnnnnnnnnnnnnnnnnnnnnnnnnnnnnnnnnnnnnnnnnnnnnnnnnnnnnnnnnnnnnnnnnnnnnnnnnnnnnnnnnnnnnnnnnnnnnnnnnnnnnnnnnnnnnnnnnnnnnnnnnnnnnnnnnnnnnnnnnnnnnnnnnnnnnnnnnnnnnnnnnnnnnnnnnnnnnnnnnnnnnnnnnnnnnnnnnnnnnnnnnnnnnnnnnnnnnnnnnnnnnnnnnnnnnnnnnnnnnnnnnnnnnnnnnnnnnnnnnnnnnnnnnnnnnnnnnnnnnnnnnnnnnnnnnnnnnnnnnnnnnnnnnnnnnnnnnnnnnnnnnnnnnnnnnnnnnnnnnnnnnnnnnnnnnnnnnnnnnnnnnnnnnnnnnnnnnnnnnnnnnnnnnnnnnnnnnnnnnnnnnnnnnnnnnnnnnnnnnnnnnnnnnnnnnnnnnnnnnnnnnnnnnnnnnnnnnnnnnnnnnnnnnnnnnnnnnnnnnnnnnnnnnnnnnnnnnnnnnnnnnnnnnnnnnnnnnnnnnnnnnnnnnnnnnnnnnnnnnnnnnnnnnnnnnnnnnnnnnnnnnnnnnnnnnnnnnnnnnnnnnnnnnnnnnnnnnnnnnnnnnnnnnnnnnnnnnnnnnnnnnnnnnnnnnnnnnnnnnnnnnnnnnnnnnnnnnnnnnnnnnnnnnnnnnnnnnnnnnnnnnnnnnnnnnnnnnnnnnnnnnnnnnnnnnnnnnnnnnnnnnnnnnnnnnnnnnnnnnnnnnnnnnnnnnnnnnnnnnnnnnnnnnnnnnnnnnnnnnnnnnnnnnnnnnnnnnnnnnnnnnnnnnnnnnnnnnnnnnnnnnnnnnnnnnnnnnnnnnnnnnnnnnnnnnnnnnnnnnnnnnnnnnnnnnnnnnnnnnnnnnnnnnnnnnnnnnnnnnnnnnnnnnnnnnnnnnnnnnnnnnnnnnnnnnnnnnnnnnnnnnnnnnnnnnnnnnnnnnnnnnnnnnnnnnnnnnnnnnnnnnnnnnnnnnnnnnnnnnnnnnnnnnnnnnnnnnnnnnnnnnnnnnnnnnnnnnnnnnnnnnnnnnnnnnnnnnnnnnnnnnnnnnnnnnnnnnnnnnnnnnnnnnnnnnnnnnnnnnnnnnnnnnnnnnnnnnnnnnnnnnnnnnnnnnnnnnnnnnnnnnnnnnnnnnnnnnnnnnnnnnnnnnnnnnnnnnnnnnnnnnnnnnnnnnnnnnnnnnnnnnnnnnnnnnnnnnnnnnnnnnnnnnnnnnnnnnnnnnnnnnnnnnnnnnnnnnnnnnnnnnnnnnnnnnnnnnnnnnnnnnnnnnnnnnnnnnnnnnnnnnnnnnnnnnnnnnnnnnnnnnnnnnnnnnnnnnnnnnnnnnnnnnnnnnnnnnnnnnnnnnnnnnnnnnnnnnnnnnnnnnnnnnnnnnnnnnnnnnnnnnnnnnnnnnnnnnnnnnnnnnnnnnnnnnnnnnnnnnnnnnnnnnnnnnnnnnnnnnnnnnnnnnnnnnnnnnnnnnnnnnnnnnnnnnnnnnnnnnnnnnnnnnnnnnnnnnnnnnnnnnnnnnnnnnnnnnnnnnnnnnnnnnnnnnnnnnnnnnnnnnnnnnnnnnnnnnnnnnnnnnnnnnnnnnnnnnnnnnnnnnnnnnnnnnnnnnnnnnnnnnnnnnnnnnnnnnnnnnnnnnnnnnnnnnnnnnnnnnnnnnnnnnnnnnnnnnnnnnnnnnnnnnnnnnnnnnnnnnnnnnnnnnnnnnnnnnnnnnnnnnnnnnnnnnnnnnnnnnnnnnnnnnnnnnnnnnnnnnnnnnnnnnnnnnnnnnnnnnnnnnnnnnnnnnnnnnnnnnnnnnnnnnnnnnnnnnnnnnnnnnnnnnnnnnnnnnnnnnnnnnnnnnnnnnnnnnnnnnnnnnnnnnnnnnnnnnnnnnnnnnnnnnnnnnnnnnnnnnnnnnnnnnnnnnnnnnnnnnnnnnnnnnnnnnnnnnnnnnnnnnnnnnnnnnnnnnnnnnnnnnnnnnnnnnnnnnnnnnnnnnnnnnnnnnnnnnnnnnnnnnnnnnnnnnnnnnnnnnnnnnnnnnnnnnnnnnnnnnnnnnnnnnnnnnnnnnnnnnnnnnnnnnnnnnnnnnnnnnnnnnnnnnnnnnnnnnnnnnnnnnnnnnnnnnnnnnnnnnnnnnnnnnnnnnnnnnnnnnnnnnnnnnnnnnnnnnnnnnnnnnnnnnnnnnnnnnnnnnnnnnnnnnnnnnnnnnnnnnnnnnnnnnnnnnnnnnnnnnnnnnnnnnnnnnnnnnnnnnnnnnnnnnnnnnnnnnnnnnnnnnnnnnnnnnnnnnnnnnnnnnnnnnnnnnnnnnnnnnnnnnnnnnnnnnnnnnnnnnnnnnnnnnnnnnnnnnnnnnnnnnnnnnnnnnnnnnnnnnnnnnnnnnnnnnnnnnnnnnnnnnnnnnnnnnnnnnnnnnnnnnnnnnnnnnnnnnnnnnnnnnnnnnnnnnnnnnnnnnnnnnnnnnnnnnnnnnnnnnnnnnnnnnnnnnnnnnnnnnnnnnnnnnnnnnnnnnnnnnnnnnnnnnnnnnnnnnnnnnnnnnnnnnnnnnnnnnnnnnnnnnnnnnnnnnnnnnnnnnnnnnnnnnnnnnnnnnnnnnnnnnnnnnnnnnnnnnnnnnnnnnnnnnnnnnnnnnnnnnnnnnnnnnnnnnnnnnnnnnnnnnnnnnnnnnnnnnnnnnnnnnnnnnnnnnnnnnnnnnnnnnnnnnnnnnnnnnnnnnnnnnnnnnnnnnnnnnnnnnnnnnnnnnnnnnnnnnnnnnnnnnnnnnnnnnnnnnnnnnnnnnnnnnnnnnnnnnnnnnnnnnnnnnnnnnnnnnnnnnnnnnnnnnnnnnnnnnnnnnnnnnnnnnnnnnnnnnnnnnnnnnnnnnnnnnnnnnnnnnnnnnnnnnnnnnnnnnnnnnnnnnnnnnnnnnnnnnnnnnnnnnnnnnnnnnnnnnnnnnnnnnnnnnnnnnnnnnnnnnnnnnnnnnnnnnnnnnnnnnnnnnnnnnnnnnnnnnnnnnnnnnnnnnnnnnnnnnnnnnnnnnnnnnnnnnnnnnnnnnnnnnnnnnnnnnnnnnnnnnnnnnnnnnnnnnnnnnnnnnnnnnnnnnnnnnnnnnnnnnnnnnnnnnnnnnnnnnnnnnnnnnnnnnnnnnnnnnnnnnnnnnnnnnnnnnnnnnnnnnnnnnnnnnnnnnnnnnnnnnnnnnnnnnnnnnnnnnnnnnnnnnnnnnnnnnnnnnnnnnnnnnnnnnnnnnnnnnnnnnnnnnnnnnnnnnnnnnnnnnnnnnnnnnnnnnnnnnnnnnnnnnnnnnnnnnnnnnnnnnnnnnnnnnnnnnnnnnnnnnnnnnnnnnnnnnnnnnnnnnnnnnnnnnnnnnnnnnnnnnnnnnnnnnnnnnnnnnnnnnnnnnnnnnnnnnnnnnnnnnnnnnnnnnnnnnnnnnnnnnnnnnnnnnnnnnnnnnnnnnnnnnnnnnnnnnnnnnnnnnnnnnnnnnnnnnnnnnnnnnnnnnnnnnnnnnnnnnnnnnnnnnnnnnnnnnnnnnnnnnnnnnnnnnnnnnnnnnnnnnnnnnnnnnnnnnnnnnnnnnnnnnnnnnnnnnnnnnnnnnnnnnnnnnnnnnnnnnnnnnnnnnnnnnnnnnnnnnnnnnnnnnnnnnnnnnnnnnnnnnnnnnnnnnnnnnnnnnnnnnnnnnnnnnnnnnnnnnnnnnnnnnnnnnnnnnnnnnnnnnnnnnnnnnnnnnnnnnnnnnnnnnnnnnnnnnnnnnnnnnnnnnnnnnnnnnnnnnnnnnnnnnnnnnnnnnnnnnnnnnnnnnnnnnnnnnnnnnnnnnnnnnnnnnnnnnnnnnnnnnnnnnnnnnnnnnnnnnnnnnnnnnnnnnnnnnnnnnnnnnnnnnnnnnnnnnnnnnnnnnnnnnnnnnnnnnnnnnnnnnnnnnnnnnnnnnnnnnnnnnnnnnnnnnnnnnnnnnnnnnnnnnnnnnnnnnnnnnnnnnnnnnnnnnnnnnnnnnnnnnnnnnnnnnnnnnnnnnnnnnnnnnnnnnnnnnnnnnnnnnnnnnnnnnnnnnnnnnnnnnnnnnnnnnnnnnnnnnnnnnnnnnnnnnnnnnnnnnnnnnnnnnnnnnnnnnnnnnnnnnnnnnnnnnnnnnnnnnnnnnnnnnnnnnnnnnnnnnnnnnnnnnnnnnnnnnnnnnnnnnnnnnnnnnnnnnnnnnnnnnnnnnnnnnnnnnnnnnnnnnnnnnnnnnnnnnnnnnnnnnnnnnnnnnnnnnnnnnnnnnnnnnnnnnnnnnnnnnnnnnnnnnnnnnnnnnnnnnnnnnnnnnnnnnnnnnnnnnnnnnnnnnnnnnnnnnnnnnnnnnnnnnnnnnnnnnnnnnnnnnnnnnnnnnnnnnnnnnnnnnnnnnnnnnnnnnnnnnnnnnnnnnnnnnnnnnnnnnnnnnnnnnnnnnnnnnnnnnnnnnnnnnnnnnnnnnnnnnnnnnnnnnnnnnnnnnnnnnnnnnnnnnnnnnnnnnnnnnnnnnnnnnnnnnnnnnnnnnnnnnnnnnnnnnnnnnnnnnnnnnnnnnnnnnnnnnnnnnnnnnnnnnnnnnnnnnnnnnnnnnnnnnnnnnnnnnnnnnnnnnnnnnnnnnnnnnnnnnnnnnnnnnnnnnnnnnnnnnnnnnnnnnnnnnnnnnnnnnnnnnnnnnnnnnnnnnnnnnnnnnnnnnnnnnnnnnnnnnnnnnnnnnnnnnnnnnnnnnnnnnnnnnnnnnnnnnnnnnnnnnnnnnnnnnnnnnnnnnnnnnnnnnnnnnnnnnnnnnnnnnnnnnnnnnnnnnnnnnnnnnnnnnnnnnnnnnnnnnnnnnnnnnnnnnnnnnnnnnnnnnnnnnnnnnnnnnnnnnnnnnnnnnnnnnnnnnnnnnnnnnnnnnnnnnnnnnnnnnnnnnnnnnnnnnnnnnnnnnnnnnnnnnnnnnnnnnnnnnnnnnnnnnnnnnnnnnnnnnnnnnnnnnnnnnnnnnnnnnnnnnnnnnnnnnnnnnnnnnnnnnnnnnnnnnnnnnnnnnnnnnnnnnnnnnnnnnnnnnnnnnnnnnnnnnnnnnnnnnnnnnnnnnnnnnnnnnnnnnnnnnnnnnnnnnnnnnnnnnnnnnnnnnnnnnnnnnnnnnnnnnnnnnnnnnnnnnnnnnnnnnnnnnnnnnnnnnnnnnnnnnnnnnnnnnnnnnnnnnnnnnnnnnnnnnnnnnnnnnnnnnnnnnnnnnnnnnnnnnnnnnnnnnnnnnnnnnnnnnnnnnnnnnnnnnnnnnnnnnnnnnnnnnnnnnnnnnnnnnnnnnnnnnnnnnnnnnnnnnnnnnnnnnnnnnnnnnnnnnnnnnnnnnnnnnnnnnnnnnnnnnnnnnnnnnnnnnnnnnnnnnnnnnnnnnnnnnnnnnnnnnnnnnnnnnnnnnnnnnnnnnnnnnnnnnnnnnnnnnnnnnnnnnnnnnnnnnnnnnnnnnnnnnnnnnnnnnnnnnnnnnnnnnnnnnnnnnnnnnnnnnnnnnnnnnnnnnnnnnnnnnnnnnnnnnnnnnnnnnnnnnnnnnnnnnnnnnnnnnnnnnnnnnnnnnnnnnnnnnnnnnnnnnnnnnnnnnnnnnnnnnnnnnnnnnnnnnnnnnnnnnnnnnnnnnnnnnnnnnnnnnnnnnnnnnnnnnnnnnnnnnnnnnnnnnnnnnnnnnnnnnnnnnnnnnnnnnnnnnnnnnnnnnnnnnnnnnnnnnnnnnnnnnnnnnnnnnnnnnnnnnnnnnnnnnnnnnnnnnnnnnnnnnnnnnnnnnnnnnnnnnnnnnnnnnnnnnnnnnnnnnnnnnnnnnnnnnnnnnnnnnnnnnnnnnnnnnnnnnnnnnnnnnnnnnnnnnnnnnnnnnnnnnnnnnnnnnnnnnnnnnnnnnnnnnnnnnnnnnnnnnnnnnnnnnnnnnnnnnnnnnnnnnnnnnnnnnnnnnnnnnnnnnnnnnnnnnnnnnnnnnnnnnnnnnnnnnnnnnnnnnnnnnnnnnnnnnnnnnnnnnnnnnnnnnnnnnnnnnnnnnnnnnnnnnnnnnnnnnnnnnnnnnnnnnnnnnnnnnnnnnnnnnnnnnnnnnnnnnnnnnnnnnnnnnnnnnnnnnnnnnnnnnnnnnnnnnnnnnnnnnnnnnnnnnnnnnnnnnnnnnnnnnnnnnnnnnnnnnnnnnnnnnnnnnnnnnnnnnnnnnnnnnnnnnnnnnnnnnnnnnnnnnnnnnnnnnnnnnnnnnnnnnnnnnnnnnnnnnnnnnnnnnnnnnnnnnnnnnnnnnnnnnnnnnnnnnnnnnnnnnnnnnnnnnnnnnnnnnnnnnnnnnnnnnnnnnnnnnnnnnnnnnnnnnnnnnnnnnnnnnnnnnnnnnnnnnnnnnnnnnnnnnnnnnnnnnnnnnnnnnnnnnnnnnnnnnnnnnnnnnnnnnnnnnnnnnnnnnnnnnnnnnnnnnnnnnnnnnnnnnnnnnnnnnnnnnnnnnnnnnnnnnnnnnnnnnnnnnnnnnnnnnnnnnnnnnnnnnnnnnnnnnnnnnnnnnnnnnnnnnnnnnnnnnnnnnnnnnnnnnnnnnnnnnnnnnnnnnnnnnnnnnnnnnnnnnnnnnnnnnnnnnnnnnnnnnnnnnnnnnnnnnnnnnnnnnnnnnnnnnnnnnnnnnnnnnnnnnnnnnnnnnnnnnnnnnnnnnnnnnnnnnnnnnnnnnnnnnnnnnnnnnnnnnnnnnnnnnnnnnnnnnnnnnnnnnnnnnnnnnnnnnnnnnnnnnnnnnnnnnnnnnnnnnnnnnnnnnnnnnnnnnnnnnnnnnnnnnnnnnnnnnnnnnnnnnnnnnnnnnnnnnnnnnnnnnnnnnnnnnnnnnnnnnnnnnnnnnnnnnnnnnnnnnnnnnnnnnnnnnnnnnnnnnnnnnnnnnnnnnnnnnnnnnnnnnnnnnnnnnnnnnnnnnnnnnnnnnnnnnnnnnnnnnnnnnnnnnnnnnnnnnnnnnnnnnnnnnnnnnnnnnnnnnnnnnnnnnnnnnnnnnnnnnnnnnnnnnnnnnnnnnnnnnnnnnnnnnnnnnnnnnnnnnnnnnnnnnnnnnnnnnnnnnnnnnnnnnnnnnnnnnnnnnnnnnnnnnnnnnnnnnnnnnnnnnnnnnnnnnnnnnnnnnnnnnnnnnnnnnnnnnnnnnnnnnnnnnnnnnnnnnnnnnnnnnnnnnnnnnnnnnnnnnnnnnnnnnnnnnnnnnnnnnnnnnnnnnnnnnnnnnnnnnnnnnnnnnnnnnnnnnnnnnnnnnnnnnnnnnnnnnnnnnnnnnnnnnnnnnnnnnnnnnnnnnnnnnnnnnnnnnnnnnnnnnnnnnnnnnnnnnnnnnnnnnnnnnnnnnnnnnnnnnnnnnnnnnnnnnnnnnnnnnnnnnnnnnnnnnnnnnnnnnnnnnnnnnnnnnnnnnnnnnnnnnnnnnnnnnnnnnnnnnnnnnnnnnnnnnnnnnnnnnnnnnnnnnnnnnnnnnnnnnnnnnnnnnnnnnnnnnnnnnnnnnnnnnnnnnnnnnnnnnnnnnnnnnnnnnnnnnnnnnnnnnnnnnnnnnnnnnnnnnnnnnnnnnnnnnnnnnnnnnnnnnnnnnnnnnnnnnnnnnnnnnnnnnnnnnnnnnnnnnnnnnnnnnnnnnnnnnnnnnnnnnnnnnnnnnnnnnnnnnnnnnnnnnnnnnnnnnnnnnnnnnnnnnnnnnnnnnnnnnnnnnnnnnnnnnnnnnnnnnnnnnnnnnnnnnnnnnnnnnnnnnnnnnnnnnnnnnnnnnnnnnnnnnnnnnnnnnnnnnnnnnnnnnnnnnnnnnnnnnnnnnnnnnnnnnnnnnnnnnnnnnnnnnnnnnnnnnnnnnnnnnnnnnnnnnnnnnnnnnnnnnnnnnnnnnnnnnnnnnnnnnnnnnnnnnnnnnnnnnnnnnnnnnnnnnnnnnnnnnnnnnnnnnnnnnnnnnnnnnnnnnnnnnnnnnnnnnnnnnnnnnnnnnnnnnnnnnnnnnnnnnnnnnnnnnnnnnnnnnnnnnnnnnnnnnnnnnnnnnnnnnnnnnnnnnnnnnnnnnnnnnnnnnnnnnnnnnnnnnnnnnnnnnnnnnnnnnnnnnnnnnnnnnnnnnnnnnnnnnnnnnnnnnnnnnnnnnnnnnnnnnnnnnnnnnnnnnnnnnnnnnnnnnnnnnnnnnnnnnnnnnnnnnnnnnnnnnnnnnnnnnnnnnnnnnnnnnnnnnnnnnnnnnnnnnnnnnnnnnnnnnnnnnnnnnnnnnnnnnnnnnnnnnnnnnnnnnnnnnnnnnnnnnnnnnnnnnnnnnnnnnnnnnnnnnnnnnnnnnnnnnnnnnnnnnnnnnnnnnnnnnnnnnnnnnnnnnnnnnnnnnnnnnnnnnnnnnnnnnnnnnnnnnnnnnnnnnnnnnnnnnnnnnnnnnnnnnnnnnnnnnnnnnnnnnnnnnnnnnnnnnnnnnnnnnnnnnnnnnnnnnnnnnnnnnnnnnnnnnnnnnnnnnnnnnnnnnnnnnnnnnnnnnnnnnnnnnnnnnnnnnnnnnnnnnnnnnnnnnnnnnnnnnnnnnnnnnnnnnnnnnnnnnnnnnnnnnnnnnnnnnnnnnnnnnnnnnnnnnnnnnnnnnnnnnnnnnnnnnnnnnnnnnnnnnnnnnnnnnnnnnnnnnnnnnnnnnnnnnnnnnnnnnnnnnnnnnnnnnnnnnnnnnnnnnnnnnnnnnnnnnnnnnnnnnnnnnnnnnnnnnnnnnnnnnnnnnnnnnnnnnnnnnnnnnnnnnnnnnnnnnnnnnnnnnnnnnnnnnnnnnnnnnnnnnnnnnnnnnnnnnnnnnnnnnnnnnnnnnnnnnnnnnnnnnnnnnnnnnnnnnnnnnnnnnnnnnnnnnnnnnnnnnnnnnnnnnnnnnnnnnnnnnnnnnnnnnnnnnnnnnnnnnnnnnnnnnnnnnnnnnnnnnnnnnnnnnnnnnnnnnnnnnnnnnnnnnnnnnnnnnnnnnnnnnnnnnnnnnnnnnnnnnnnnnnnnnnnnnnnnnnnnnnnnnnnnnnnnnnnnnnnnnnnnnnnnnnnnnnnnnnnnnnnnnnnnnnnnnnnnnnnnnnnnnnnnnnnnnnnnnnnnnnnnnnnnnnnnnnnnnnnnnnnnnnnnnnnnnnnnnnnnnnnnnnnnnnnnnnnnnnnnnnnnnnnnnnnnnnnnnnnnnnnnnnnnnnnnnnnnnnnnnnnnnnnnnnnnnnnnnnnnnnnnnnnnnnnnnnnnnnnnnnnnnnnnnnnnnnnnnnnnnnnnnnnnnnnnnnnnnnnnnnnnnnnnnnnnnnnnnnnnnnnnnnnnnnnnnnnnnnnnnnnnnnnnnnnnnnnnnnnnnnnnnnnnnnnnnnnnnnnnnnnnnnnnnnnnnnnnnnnnnnnnnnnnnnnnnnnnnnnnnnnnnnnnnnnnnnnnnnnnnnnnnnnnnnnnnnnnnnnnnnnnnnnnnnnnnnnnnnnnnnnnnnnnnnnnnnnnnnnnnnnnnnnnnnnnnnnnnnnnnnnnnnnnnnnnnnnnnnnnnnnnnnnnnnnnnnnnnnnnnnnnnnnnnnnnnnnnnnnnnnnnnnnnnnnnnnnnnnnnnnnnnnnnnnnnnnnnnnnnnnnnnnnnnnnnnnnnnnnnnnnnnnnnnnnnnnnnnnnnnnnnnnnnnnnnnnnnnnnnnnnnnnnnnnnnnnnnnnnnnnnnnnnnnnnnnnnnnnnnnnnnnnnnnnnnnnnnnnnnnnnnnnnnnnnnnnnnnnnnnnnnnnnnnnnnnnnnnnnnnnnnnnnnnnnnnnnnnnnnnnnnnnnnnnnnnnnnnnnnnnnnnnnnnnnnnnnnnnnnnnnnnnnnnnnnnnnnnnnnnnnnnnnnnnnnnnnnnnnnnnnnnnnnnnnnnnnnnnnnnnnnnnnnnnnnnnnnnnnnnnnnnnnnnnnnnnnnnnnnnnnnnnnnnnnnnnnnnnnnnnnnnnnnnnnnnnnnnnnnnnnnnnnnnnnnnnnnnnnnnnnnnnnnnnnnnnnnnnnnnnnnnnnnnnnnnnnnnnnnnnnnnnnnnnnnnnnnnnnnnnnnnnnnnnnnnnnnnnnnnnnnnnnnnnnnnnnnnnnnnnnnnnnnnnnnnnnnnnnnnnnnnnnnnnnnnnnnnnnnnnnnnnnnnnnnnnnnnnnnnnnnnnnnnnnnnnnnnnnnnnnnnnnnnnnnnnnnnnnnnnnnnnnnnnnnnnnnnnnnnnnnnnnnnnnnnnnnnnnnnnnnnnnnnnnnnnnnnnnnnnnnnnnnnnnnnnnnnnnnnnnnnnnnnnnnnnnnnnnnnnnnnnnnnnnnnnnnnnnnnnnnnnnnnnnnnnnnnnnnnnnnnnnnnnnnnnnnnnnnnnnnnnnnnnnnnnnnnnnnnnnnnnnnnnnnnnnnnnnnnnnnnnnnnnnnnnnnnnnnnnnnnnnnnnnnnnnnnnnnnnnnnnnnnnnnnnnnnnnnnnnnnnnnnnnnnnnnnnnnnnnnnnnnnnnnnnnnnnnnnnnnnnnnnnnnnnnnnnnnnnnnnnnnnnnnnnnnnnnnnnnnnnnnnnnnnnnnnnnnnnnnnnnnnnnnnnnnnnnnnnnnnnnnnnnnnnnnnnnnnnnnnnnnnnnnnnnnnnnnnnnnnnnnnnnnnnnnnnnnnnnnnnnnnnnnnnnnnnnnnnnnnnnnnnnnnnnnnnnnnnnnnnnnnnnnnnnnnnnnnnnnnnnnnnnnnnnnnnnnnnnnnnnnnnnnnnnnnnnnnnnnnnnnnnnnnnnnnnnnnnnnnnnnnnnnnnnnnnnnnnnnnnnnnnnnnnnnnnnnnnnnnnnnnnnnnnnnnnnnnnnnnnnnnnnnnnnnnnnnnnnnnnnnnnnnnnnnnnnnnnnnnnnnnnnnnnnnnnnnnnnnnnnnnnnnnnnnnnnnnnnnnnnnnnnnnnnnnnnnnnnnnnnnnnnnnnnnnnnnnnnnnnnnnnnnnnnnnnnnnnnnnnnnnnnnnnnnnnnnnnnnnnnnnnnnnnnnnnnnnnnnnnnnnnnnnnnnnnnnnnnnnnnnnnnnnnnnnnnnnnnnnnnnnnnnnnnnnnnnnnnnnnnnnnnnnnnnnnnnnnnnnnnnnnnnnnnnnnnnnnnnnnnnnnnnnnnnnnnnnnnnnnnnnnnnnnnnnnnnnnnnnnnnnnnnnnnnnnnnnnnnnnnnnnnnnnnnnnnnnnnnnnnnnnnnnnnnnnnnnnnnnnnnnnnnnnnnnnnnnnnnnnnnnnnnnnnnnnnnnnnnnnnnnnnnnnnnnnnnnnnnnnnnnnnnnnnnnnnnnnnnnnnnnnnnnnnnnnnnnnnnnnnnnnnnnnnnnnnnnnnnnnnnnnnnnnnnnnnnnnnnnnnnnnnnnnnnnnnnnnnnnnnnnnnnnnnnnnnnnnnnnnnnnnnnnnnnnnnnnnnnnnnnnnnnnnnnnnnnnnnnnnnnnnnnnnnnnnnnnnnnnnnnnnnnnnnnnnnnnnnnnnnnnnnnnnnnnnnnnnnnnnnnnnnnnnnnnnnnnnnnnnnnnnnnnnnnnnnnnnnnnnnnnnnnnnnnnnnnnnnnnnnnnnnnnnnnnnnnnnnnnnnnnnnnnnnnnnnnnnnnnnnnnnnnnnnnnnnnnnnnnnnnnnnnnnnnnnnnnnnnnnnnnnnnnnnnnnnnnnnnnnnnnnnnnnnnnnnnnnnnnnnnnnnnnnnnnnnnnnnnnnnnnnnnnnnnnnnnnnnnnnnnnnnnnnnnnnnnnnnnnnnnnnnnnnnnnnnnnnnnnnnnnnnnnnnnnnnnnnnnnnnnnnnnnnnnnnnnnnnnnnnnnnnnnnnnnnnnnnnnnnnnnnnnnnnnnnnnnnnnnnnnnnnnnnnnnnnnnnnnnnnnnnnnnnnnnnnnnnnnnnnnnnnnnnnnnnnnnnnnnnnnnnnnnnnnnnnnnnnnnnnnnnnnnnnnnnnnnnnnnnnnnnnnnnnnnnnnnnnnnnnnnnnnnnnnnnnnnnnnnnnnnnnnnnnnnnnnnnnnnnnnnnnnnnnnnnnnnnnnnnnnnnnnnnnnnnnnnnnnnnnnnnnnnnnnnnnnnnnnnnnnnnnnnnnnnnnnnnnnnnnnnnnnnnnnnnnnnnnnnnnnnnnnnnnnnnnnnnnnnnnnnnnnnnnnnnnnnnnnnnnnnnnnnnnnnnnnnnnnnnnnnnnnnnnnnnnnnnnnnnnnnnnnnnnnnnnnnnnnnnnnnnnnnnnnnnnnnnnnnnnnnnnnnnnnnnnnnnnnnnnnnnnnnnnnnnnnnnnnnnnnnnnnnnnnnnnnnnnnnnnnnnnnnnnnnnnnnnnnnnnnnnnnnnnnnnnnnnnnnnnnnnnnnnnnnnnnnnnnnnnnnnnnnnnnnnnnnnnnnnnnnnnnnnnnnnnnnnnnnnnnnnnnnnnnnnnnnnnnnnnnnnnnnnnnnnnnnnnnnnnnnnnnnnnnnnnnnnnnnnnnnnnnnnnnnnnnnnnnnnnnnnnnnnnnnnnnnnnnnnnnnnnnnnnnnnnnnnnnnnnnnnnnnnnnnnnnnnnnnnnnnnnnnnnnnnnnnnnnnnnnnnnnnnnnnnnnnnnnnnnnnnnnnnnnnnnnnnnnnnnnnnnnnnnnnnnnnnnnnnnnnnnnnnnnnnnnnnnnnnnnnnnnnnnnnnnnnnnnnnnnnnnnnnnnnnnnnnnnnnnnnnnnnnnnnnnnnnnnnnnnnnnnnnnnnnnnnnnnnnnnnnnnnnnnnnnnnnnnnnnnnnnnnnnnnnnnnnnnnnnnnnnnnnnnnnnnnnnnnnnnnnnnnnnnnnnnnnnnnnnnnnnnnnnnnnnnnnnnnnnnnnnnnnnnnnnnnnnnnnnnnnnnnnnnnnnnnnnnnnnnnnnnnnnnnnnnnnnnnnnnnnnnnnnnnnnnnnnnnnnnnnnnnnnnnnnnnnnnnnnnnnnnnnnnnnnnnnnnnnnnnnnnnnnnnnnnnnnnnnnnnnnnnnnnnnnnnnnnnnnnnnnnnnnnnnnnnnnnnnnnnnnnnnnnnnnnnnnnnnnnnnnnnnnnnnnnnnnnnnnnnnnnnnnnnnnnnnnnnnnnnnnnnnnnnnnnnnnnnnnnnnnnnnnnnnnnnnnnnnnnnnnnnnnnnnnnnnnnnnnnnnnnnnnnnnnnnnnnnnnnnnnnnnnnnnnnnnnnnnnnnnnnnnnnnnnnnnnnnnnnnnnnnnnnnnnnnnnnnnnnnnnnnnnnnnnnnnnnnnnnnnnnnnnnnnnnnnnnnnnnnnnnnnnnnnnnnnnnnnnnnnnnnnnnnnnnnnnnnnnnnnnnnnnnnnnnnnnnnnnnnnnnnnnnnnnnnnnnnnnnnnnnnnnnnnnnnnnnnnnnnnnnnnnnnnnnnnnnnnnnnnnnnnnnnnnnnnnnnnnnnnnnnnnnnnnnnnnnnnnnnnnnnnnnnnnnnnnnnnnnnnnnnnnnnnnnnnnnnnnnnnnnnnnnnnnnnnnnnnnnnnnnnnnnnnnnnnnnnnnnnnnnnnnnnnnnnnnnnnnnnnnnnnnnnnnnnnnnnnnnnnnnnnnnnnnnnnnnnnnnnnnnnnnnnnnnnnnnnnnnnnnnnnnnnnnnnnnnnnnnnnnnnnnnnnnnnnnnnnnnnnnnnnnnnnnnnnnnnnnnnnnnnnnnnnnnnnnnnnnnnnnnnnnnnnnnnnnnnnnnnnnnnnnnnnnnnnnnnnnnnnnnnnnnnnnnnnnnnnnnnnnnnnnnnnnnnnnnnnnnnnnnnnnnnnnnnnnnnnnnnnnnnnnnnnnnnnnnnnnnnnnnnnnnnnnnnnnnnnnnnnnnnnnnnnnnnnnnnnnnnnnnnnnnnnnnnnnnnnnnnnnnnnnnnnnnnnnnnnnnnnnnnnnnnnnnnnnnnnnnnnnnnnnnnnnnnnnnnnnnnnnnnnnnnnnnnnnnnnnnnnnnnnnnnnnnnnnnnnnnnnnnnnnnnnnnnnnnnnnnnnnnnnnnnnnnnnnnnnnnnnnnnnnnnnnnnnnnnnnnnnnnnnnnnnnnnnnnnnnnnnnnnnnnnnnnnnnnnnnnnnnnnnnnnnnnnnnnnnnnnnnnnnnnnnnnnnnnnnnnnnnnnnnnnnnnnnnnnnnnnnnnnnnnnnnnnnnnnnnnnnnnnnnnnnnnnnnnnnnnnnnnnnnnnnnnnnnnnnnnnnnnnnnnnnnnnnnnnnnnnnnnnnnnnnnnnnnnnnnnnnnnnnnnnnnnnnnnnnnnnnnnnnnnnnnnnnnnnnnnnnnnnnnnnnnnnnnnnnnnnnnnnnnnnnnnnnnnnnnnnnnnnnnnnnnnnnnnnnnnnnnnnnnnnnnnnnnnnnnnnnnnnnnnnnnnnnnnnnnnnnnnnnnnnnnnnnnnnnnnnnnnnnnnnnnnnnnnnnnnnnnnnnnnnnnnnnnnnnnnnnnnnnnnnnnnnnnnnnnnnnnnnnnnnnnnnnnnnnnnnnnnnnnnnnnnnnnnnnnnnnnnnnnnnnnnnnnnnnnnnnnnnnnnnnnnnnnnnnnnnnnnnnnnnnnnnnnnnnnnnnnnnnnnnnnnnnnnnnnnnnnnnnnnnnnnnnnnnnnnnnnnnnnnnnnnnnnnnnnnnnnnnnnnnnnnnnnnnnnnnnnnnnnnnnnnnnnnnnnnnnnnnnnnnnnnnnnnnnnnnnnnnnnnnnnnnnnnnnnnnnnnnnnnnnnnnnnnnnnnnnnnnnnnnnnnnnnnnnnnnnnnnnnnnnnnnnnnnnnnnnnnnnnnnnnnnnnnnnnnnnnnnnnnnnnnnnnnnnnnnnnnnnnnnnnnnnnnnnnnnnnnnnnnnnnnnnnnnnnnnnnnnnnnnnnnnnnnnnnnnnnnnnnnnnnnnnnnnnnnnnnnnnnnnnnnnnnnnnnnnnnnnnnnnnnnnnnnnnnnnnnnnnnnnnnnnnnnnnnnnnnnnnnnnnnnnnnnnnnnnnnnnnnnnnnnnnnnnnnnnnnnnnnnnnnnnnnnnnnnnnnnnnnnnnnnnnnnnnnnnnnnnnnnnnnnnnnnnnnnnnnnnnnnnnnnnnnnnnnnnnnnnnnnnnnnnnnnnnnnnnnnnnnnnnnnnnnnnnnnnnnnnnnnnnnnnnnnnnnnnnnnnnnnnnnnnnnnnnnnnnnnnnnnnnnnnnnnnnnnnnnnnnnnnnnnnnnnnnnnnnnnnnnnnnnnnnnnnnnnnnnnnnnnnnnnnnnnnnnnnnnnnnnnnnnnnnnnnnnnnnnnnnnnnnnnnnnnnnnnnnnnnnnnnnnnnnnnnnnnnnnnnnnnnnnnnnnnnnnnnnnnnnnnnnnnnnnnnnnnnnnnnnnnnnnnnnnnnnnnnnnnnnnnnnnnnnnnnnnnnnnnnnnnnnnnnnnnnnnnnnnnnnnnnnnnnnnnnnnnnnnnnnnnnnnnnnnnnnnnnnnnnnnnnnnnnnnnnnnnnnnnnnnnnnnnnnnnnnnnnnnnnnnnnnnnnnnnnnnnnnnnnnnnnnnnnnnnnnnnnnnnnnnnnnnnnnnnnnnnnnnnnnnnnnnnnnnnnnnnnnnnnnnnnnnnnnnnnnnnnnnnnnnnnnnnnnnnnnnnnnnnnnnnnnnnnnnnnnnnnnnnnnnnnnnnnnnnnnnnnnnnnnnnnnnnnnnnnnnnnnnnnnnnnnnnnnnnnnnnnnnnnnnnnnnnnnnnnnnnnnnnnnnnnnnnnnnnnnnnnnnnnnnnnnnnnnnnnnnnnnnnnnnnnnnnnnnnnnnnnnnnnnnnnnnnnnnnnnnnnnnnnnnnnnnnnnnnnnnnnnnnnnnnnnnnnnnnnnnnnnnnnnnnnnnnnnnnnnnnnnnnnnnnnnnnnnnnnnnnnnnnnnnnnnnnnnnnnnnnnnnnnnnnnnnnnnnnnnnnnnnnnnnnnnnnnnnnnnnnnnnnnnnnnnnnnnnnnnnnnnnnnnnnnnnnnnnnnnnnnnnnnnnnnnnnnnnnnnnnnnnnnnnnnnnnnnnnnnnnnnnnnnnnnnnnnnnnnnnnnnnnnnnnnnnnnnnnnnnnnnnnnnnnnnnnnnnnnnnnnnnnnnnnnnnnnnnnnnnnnnnnnnnnnnnnnnnnnnnnnnnnnnnnnnnnnnnnnnnnnnnnnnnnnnnnnnnnnnnnnnnnnnnnnnnnnnnnnnnnnnnnnnnnnnnnnnnnnnnnnnnnnnnnnnnnnnnnnnnnnnnnnnnnnnnnnnnnnnnnnnnnnnnnnnnnnnnnnnnnnnnnnnnnnnnnnnnnnnnnnnnnnnnnnnnnnnnnnnnnnnnnnnnnnnnnnnnnnnnnnnnnnnnnnnnnnnnnnnnnnnnnnnnnnnnnnnnnnnnnnnnnnnnnnnnnnnnnnnnnnnnnnnnnnnnnnnnnnnnnnnnnnnnnnnnnnnnnnnnnnnnnnnnnnnnnnnnnnnnnnnnnnnnnnnnnnnnnnnnnnnnnnnnnnnnnnnnnnnnnnnnnnnnnnnnnnnnnnnnnnnnnnnnnnnnnnnnnnnnnnnnnnnnnnnnnnnnnnnnnnnnnnnnnnnnnnnnnnnnnnnnnnnnnnnnnnnnnnnnnnnnnnnnnnnnnnnnnnnnnnnnnnnnnnnnnnnnnnnnnnnnnnnnnnnnnnnnnnnnnnnnnnnnnnnnnnnnnnnnnnnnnnnnnnnnnnnnnnnnnnnnnnnnnnnnnnnnnnnnnnnnnnnnnnnnnnnnnnnnnnnnnnnnnnnnnnnnnnnnnnnnnnnnnnnnnnnnnnnnnnnnnnnnnnnnnnnnnnnnnnnnnnnnnnnnnnnnnnnnnnnnnnnnnnnnnnnnnnnnnnnnnnnnnnnnnnnnnnnnnnnnnnnnnnnnnnnnnnnnnnnnnnnnnnnnnnnnnnnnnnnnnnnnnnnnnnnnnnnnnnnnnnnnnnnnnnnnnnnnnnnnnnnnnnnnnnnnnnnnnnnnnnnnnnnnnnnnnnnnnnnnnnnnnnnnnnnnnnnnnnnnnnnnnnnnnnnnnnnnnnnnnnnnnnnnnnnnnnnnnnnnnnnnnnnnnnnnnnnnnnnnnnnnnnnnnnnnnnnnnnnnnnnnnnnnnnnnnnnnnnnnnnnnnnnnnnnnnnnnnnnnnnnnnnnnnnnnnnnnnnnnnnnnnnnnnnnnnnnnnnnnnnnnnnnnnnnnnnnnnnnnnnnnnnnnnnnnnnnnnnnnnnnnnnnnnnnnnnnnnnnnnnnnnnnnnnnnnnnnnnnnnnnnnnnnnnnnnnnnnnnnnnnnnnnnnnnnnnnnnnnnnnnnnnnnnnnnnnnnnnnnnnnnnnnnnnnnnnnnnnnnnnnnnnnnnnnnnnnnnnnnnnnnnnnnnnnnnnnnnnnnnnnnnnnnnnnnnnnnnnnnnnnnnnnnnnnnnnnnnnnnnnnnnnnnnnnnnnnnnnnnnnnnnnnnnnnnnnnnnnnnnnnnnnnnnnnnnnnnnnnnnnnnnnnnnnnnnnnnnnnnnnnnnnnnnnnnnnnnnnnnnnnnnnnnnnnnnnnnnnnnnnnnnnnnnnnnnnnnnnnnnnnnnnnnnnnnnnnnnnnnnnnnnnnnnnnnnnnnnnnnnnnnnnnnnnnnnnnnnnnnnnnnnnnnnnnnnnnnnnnnnnnnnnnnnnnnnnnnnnnnnnnnnnnnnnnnnnnnnnnnnnnnnnnnnnnnnnnnnnnnnnnnnnnnnnnnnnnnnnnnnnnnnnnnnnnnnnnnnnnnnnnnnnnnnnnnnnnnnnnnnnnnnnnnnnnnnnnnnnnnnnnnnnnnnnnnnnnnnnnnnnnnnnnnnnnnnnnnnnnnnnnnnnnnnnnnnnnnnnnnnnnnnnnnnnnnnnnnnnnnnnnnnnnnnnnnnnnnnnnnnnnnnnnnnnnnnnnnnnnnnnnnnnnnnnnnnnnnnnnnnnnnnnnnnnnnnnnnnnnnnnnnnnnnnnnnnnnnnnnnnnnnnnnnnnnnnnnnnnnnnnnnnnnnnnnnnnnnnnnnnnnnnnnnnnnnnnnnnnnnnnnnnnnnnnnnnnnnnnnnnnnnnnnnnnnnnnnnnnnnnnnnnnnnnnnnnnnnnnnnnnnnnnnnnnnnnnnnnnnnnnnnnnnnnnnnnnnnnnnnnnnnnnnnnnnnnnnnnnnnnnnnnnnnnnnnnnnnnnnnnnnnnnnnnnnnnnnnnnnnnnnnnnnnnnnnnnnnnnnnnnnnnnnnnnnnnnnnnnnnnnnnnnnnnnnnnnnnnnnnnnnnnnnnnnnnnnnnnnnnnnnnnnnnnnnnnnnnnnnnnnnnnnnnnnnnnnnnnnnnnnnnnnnnnnnnnnnnnnnnnnnnnnnnnnnnnnnnnnnnnnnnnnnnnnnnnnnnnnnnnnnnnnnnnnnnnnnnnnnnnnnnnnnnnnnnnnnnnnnnnnnnnnnnnnnnnnnnnnnnnnnnnnnnnnnnnnnnnnnnnnnnnnnnnnnnnnnnnnnnnnnnnnnnnnnnnnnnnnnnnnnnnnnnnnnnnnnnnnnnnnnnnnnnnnnnnnnnnnnnnnnnnnnnnnnnnnnnnnnnnnnnnnnnnnnnnnnnnnnnnnnnnnnnnnnnnnnnnnnnnnnnnnnnnnnnnnnnnnnnnnnnnnnnnnnnnnnnnnnnnnnnnnnnnnnnnnnnnnnnnnnnnnnnnnnnnnnnnnnnnnnnnnnnnnnnnnnnnnnnnnnnnnnnnnnnnnnnnnnnnnnnnnnnnnnnnnnnnnnnnnnnnnnnnnnnnnnnnnnnnnnnnnnnnnnnnnnnnnnnnnnnnnnnnnnnnnnnnnnnnnnnnnnnnnnnnnnnnnnnnnnnnnnnnnnnnnnnnnnnnnnnnnnnnnnnnnnnnnnnnnnnnnnnnnnnnnnnnnnnnnnnnnnnnnnnnnnnnnnnnnnnnnnnnnnnnnnnnnnnnnnnnnnnnnnnnnnnnnnnnnnnnnnnnnnnnnnnnnnnnnnnnnnnnnnnnnnnnnnnnnnnnnnnnnnnnnnnnnnnnnnnnnnnnnnnnnnnnnnnnnnnnnnnnnnnnnnnnnnnnnnnnnnnnnnnnnnnnnnnnnnnnnnnnnnnnnnnnnnnnnnnnnnnnnnnnnnnnnnnnnnnnnnnnnnnnnnnnnnnnnnnnnnnnnnnnnnnnnnnnnnnnnnnnnnnnnnnnnnnnnnnnnnnnnnnnnnnnnnnnnnnnnnnnnnnnnnnnnnnnnnnnnnnnnnnnnnnnnnnnnnnnnnnnnnnnnnnnnnnnnnnnnnnnnnnnnnnnnnnnnnnnnnnnnnnnnnnnnnnnnnnnnnnnnnnnnnnnnnnnnnnnnnnnnnnnnnnnnnnnnnnnnnnnnnnnnnnnnnnnnnnnnnnnnnnnnnnnnnnnnnnnnnnnnnnnnnnnnnnnnnnnnnnnnnnnnnnnnnnnnnnnnnnnnnnnnnnnnnnnnnnnnnnnnnnnnnnnnnnnnnnnnnnnnnnnnnnnnnnnnnnnnnnnnnnnnnnnnnnnnnnnnnnnnnnnnnnnnnnnnnnnnnnnnnnnnnnnnnnnnnnnnnnnnnnnnnnnnnnnnnnnnnnnnnnnnnnnnnnnnnnnnnnnnnnnnnnnnnnnnnnnnnnnnnnnnnnnnnnnnnnnnnnnnnnnnnnnnnnnnnnnnnnnnnnnnnnnnnnnnnnnnnnnnnnnnnnnnnnnnnnnnnnnnnnnnnnnnnnnnnnnnnnnnnnnnnnnnnnnnnnnnnnnnnnnnnnnnnnnnnnnnnnnnnnnnnnnnnnnnnnnnnnnnnnnnnnnnnnnnnnnnnnnnnnnnnnnnnnnnnnnnnnnnnnnnnnnnnnnnnnnnnnnnnnnnnnnnnnnnnnnnnnnnnnnnnnnnnnnnnnnnnnnnnnnnnnnnnnnnnnnnnnnnnnnnnnnnnnnnnnnnnnnnnnnnnnnnnnnnnnnnnnnnnnnnnnnnnnnnnnnnnnnnnnnnnnnnnnnnnnnnnnnnnnnnnnnnnnnnnnnnnnnnnnnnnnnnnnnnnnnnnnnnnnnnnnnnnnnnnnnnnnnnnnnnnnnnnnnnnnnnnnnnnnnnnnnnnnnnnnnnnnnnnnnnnnnnnnnnnnnnnnnnnnnnnnnnnnnnnnnnnnnnnnnnnnnnnnnnnnnnnnnnnnnnnnnnnnnnnnnnnnnnnnnnnnnnnnnnnnnnnnnnnnnnnnnnnnnnnnnnnnnnnnnnnnnnnnnnnnnnnnnnnnnnnnnnnnnnnnnnnnnnnnnnnnnnnnnnnnnnnnnnnnnnnnnnnnnnnnnnnnnnnnnnnnnnnnnnnnnnnnnnnnnnnnnnnnnnnnnnnnnnnnnnnnnnnnnnnnnnnnnnnnnnnnnnnnnnnnnnnnnnnnnnnnnnnnnnnnnnnnnnnnnnnnnnnnnnnnnnnnnnnnnnnnnnnnnnnnnnnnnnnnnnnnnnnnnnnnnnnnnnnnnnnnnnnnnnnnnnnnnnnnnnnnnnnnnnnnnnnnnnnnnnnnnnnnnnnnnnnnnnnnnnnnnnnnnnnnnnnnnnnnnnnnnnnnnnnnnnnnnnnnnnnnnnnnnnnnnnnnnnnnnnnnnnnnnnnnnnnnnnnnnnnnnnnnnnnnnnnnnnnnnnnnnnnnnnnnnnnnnnnnnnnnnnnnnnnnnnnnnnnnnnnnnnnnnnnnnnnnnnnnnnnnnnnnnnnnnnnnnnnnnnnnnnnnnnnnnnnnnnnnnnnnnnnnnnnnnnnnnnnnnnnnnnnnnnnnnnnnnnnnnnnnnnnnnnnnnnnnnnnnnnnnnnnnnnnnnnnnnnnnnnnnnnnnnnnnnnnnnnnnnnnnnnnnnnnnnnnnnnnnnnnnnnnnnnnnnnnnnnnnnnnnnnnnnnnnnnnnnnnnnnnnnnnnnnnnnnnnnnnnnnnnnnnnnnnnnnnnnnnnnnnnnnnnnnnnnnnnnnnnnnnnnnnnnnnnnnnnnnnnnnnnnnnnnnnnnnnnnnnnnnnnnnnnnnnnnnnnnnnnnnnnnnnnnnnnnnnnnnnnnnnnnnnnnnnnnnnnnnnnnnnnnnnnnnnnnnnnnnnnnnnnnnnnnnnnnnnnnnnnnnnnnnnnnnnnnnnnnnnnnnnnnnnnnnnnnnnnnnnnnnnnnnnnnnnnnnnnnnnnnnnnnnnnnnnnnnnnnnnnnnnnnnnnnnnnnnnnnnnnnnnnnnnnnnnnnnnnnnnnnnnnnnnnnnnnnnnnnnnnnnnnnnnnnnnnnnnnnnnnnnnnnnnnnnnnnnnnnnnnnnnnnnnnnnnnnnnnnnnnnnnnnnnnnnnnnnnnnnnnnnnnnnnnnnnnnnnnnnnnnnnnnnnnnnnnnnnnnnnnnnnnnnnnnnnnnnnnnnnnnnnnnnnnnnnnnnnnnnnnnnnnnnnnnnnnnnnnnnnnnnnnnnnnnnnnnnnnnnnnnnnnnnnnnnnnnnnnnnnnnnnnnnnnnnnnnnnnnnnnnnnnnnnnnnnnnnnnnnnnnnnnnnnnnnnnnnnnnnnnnnnnnnnnnnnnnnnnnnnnnnnnnnnnnnnnnnnnnnnnnnnnnnnnnnnnnnnnnnnnnnnnnnnnnnnnnnnnnnnnnnnnnnnnnnnnnnnnnnnnnnnnnnnnnnnnnnnnnnnnnnnnnnnnnnnnnnnnnnnnnnnnnnnnnnnnnnnnnnnnnnnnnnnnnnnnnnnnnnnnnnnnnnnnnnnnnnnnnnnnnnnnnnnnnnnnnnnnnnnnnnnnnnnnnnnnnnnnnnnnnnnnnnnnnnnnnnnnnnnnnnnnnnnnnnnnnnnnnnnnnnnnnnnnnnnnnnnnnnnnnnnnnnnnnnnnnnnnnnnnnnnnnnnnnnnnnnnnnnnnnnnnnnnnnnnnnnnnnnnnnnnnnnnnnnnnnnnnnnnnnnnnnnnnnnnnnnnnnnnnnnnnnnnnnnnnnnnnnnnnnnnnnnnnnnnnnnnnnnnnnnnnnnnnnnnnnnnnnnnnnnnnnnnnnnnnnnnnnnnnnnnnnnnnnnnnnnnnnnnnnnnnnnnnnnnnnnnnnnnnnnnnnnnnnnnnnnnnnnnnnnnnnnnnnnnnnnnnnnnnnnnnnnnnnnnnnnnnnnnnnnnnnnnnnnnnnnnnnnnnnnnnnnnnnnnnnnnnnnnnnnnnnnnnnnnnnnnnnnnnnnnnnnnnnnnnnnnnnnnnnnnnnnnnnnnnnnnnnnnnnnnnnnnnnnnnnnnnnnnnnnnnnnnnnnnnnnnnnnnnnnnnnnnnnnnnnnnnnnnnnnnnnnnnnnnnnnnnnnnnnnnnnnnnnnnnnnnnnnnnnnnnnnnnnnnnnnnnnnnnnnnnnnnnnnnnnnnnnnnnnnnnnnnnnnnnnnnnnnnnnnnnnnnnnnnnnnnnnnnnnnnnnnnnnnnnnnnnnnnnnnnnnnnnnnnnnnnnnnnnnnnnnnnnnnnnnnnnnnnnnnnnnnnnnnnnnnnnnnnnnnnnnnnnnnnnnnnnnnnnnnnnnnnnnnnnnnnnnnnnnnnnnnnnnnnnnnnnnnnnnnnnnnnnnnnnnnnnnnnnnnnnnnnnnnnnnnnnnnnnnnnnnnnnnnnnnnnnnnnnnnnnnnnnnnnnnnnnnnnnnnnnnnnnnnnnnnnnnnnnnnnnnnnnnnnnnnnnnnnnnnnnnnnnnnnnnnnnnnnnnnnnnnnnnnnnnnnnnnnnnnnnnnnnnnnnnnnnnnnnnnnnnnnnnnnnnnnnnnnnnnnnnnnnnnnnnnnnnnnnnnnnnnnnnnnnnnnnnnnnnnnnnnnnnnnnnnnnnnnnnnnnnnnnnnnnnnnnnnnnnnnnnnnnnnnnnnnnnnnnnnnnnnnnnnnnnnnnnnnnnnnnnnnnnnnnnnnnnnnnnnnnnnnnnnnnnnnnnnnnnnnnnnnnnnnnnnnnnnnnnnnnnnnnnnnnnnnnnnnnnnnnnnnnnnnnnnnnnnnnnnnnnnnnnnnnnnnnnnnnnnnnnnnnnnnnnnnnnnnnnnnnnnnnnnnnnnnnnnnnnnnnnnnnnnnnnnnnnnnnnnnnnnnnnnnnnnnnnnnnnnnnnnnnnnnnnnnnnnnnnnnnnnnnnnnnnnnnnnnnnnnnnnnnnnnnnnnnnnnnnnnnnnnnnnnnnnnnnnnnnnnnnnnnnnnnnnnnnnnnnnnnnnnnnnnnnnnnnnnnnnnnnnnnnnnnnnnnnnnnnnnnnnnnnnnnnnnnnnnnnnnnnnnnnnnnnnnnnnnnnnnnnnnnnnnnnnnnnnnnnnnnnnnnnnnnnnnnnnnnnnnnnnnnnnnnnnnnnnnnnnnnnnnnnnnnnnnnnnnnnnnnnnnnnnnnnnnnnnnnnnnnnnnnnnnnnnnnnnnnnnnnnnnnnnnnnnnnnnnnnnnnnnnnnnnnnnnnnnnnnnnnnnnnnnnnnnnnnnnnnnnnnnnnnnnnnnnnnnnnnnnnnnnnnnnnnnnnnnnnnnnnnnnnnnnnnnnnnnnnnnnnnnnnnnnnnnnnnnnnnnnnnnnnnnnnnnnnnnnnnnnnnnnnnnnnnnnnnnnnnnnnnnnnnnnnnnnnnnnnnnnnnnnnnnnnnnnnnnnnnnnnnnnnnnnnnnnnnnnnnnnnnnnnnnnnnnnnnnnnnnnnnnnnnnnnnnnnnnnnnnnnnnnnnnnnnnnnnnnnnnnnnnnnnnnnnnnnnnnnnnnnnnnnnnnnnnnnnnnnnnnnnnnnnnnnnnnnnnnnnnnnnnnnnnnnnnnnnnnnnnnnnnnnnnnnnnnnnnnnnnnnnnnnnnnnnnnnnnnnnnnnnnnnnnnnnnnnnnnnnnnnnnnnnnnnnnnnnnnnnnnnnnnnnnnnnnnnnnnnnnnnnnnnnnnnnnnnnnnnnnnnnnnnnnnnnnnnnnnnnnnnnnnnnnnnnnnnnnnnnnnnnnnnnnnnnnnnnnnnnnnnnnnnnnnnnnnnnnnnnnnnnnnnnnnnnnnnnnnnnnnnnnnnnnnnnnnnnnnnnnnnnnnnnnnnnnnnnnnnnnnnnnnnnnnnnnnnnnnnnnnnnnnnnnnnnnnnnnnnnnnnnnnnnnnnnnnnnnnnnnnnnnnnnnnnnnnnnnnnnnnnnnnnnnnnnnnnnnnnnnnnnnnnnnnnnnnnnnnnnnnnnnnnnnnnnnnnnnnnnnnnnnnnnnnnnnnnnnnnnnnnnnnnnnnnnnnnnnnnnnnnnnnnnnnnnnnnnnnnnnnnnnnnnnnnnnnnnnnnnnnnnnnnnnnnnnnnnnnnnnnnnnnnnnnnnnnnnnnnnnnnnnnnnnnnnnnnnnnnnnnnnnnnnnnnnnnnnnnnnnnnnnnnnnnnnnnnnnnnnnnnnnnnnnnnnnnnnnnnnnnnnnnnnnnnnnnnnnnnnnnnnnnnnnnnnnnnnnnnnnnnnnnnnnnnnnnnnnnnnnnnnnnnnnnnnnnnnnnnnnnnnnnnnnnnnnnnnnnnnnnnnnnnnnnnnnnnnnnnnnnnnnnnnnnnnnnnnnnnnnnnnnnnnnnnnnnnnnnnnnnnnnnnnnnnnnnnnnnnnnnnnnnnnnnnnnnnnnnnnnnnnnnnnnnnnnnnnnnnnnnnnnnnnnnnnnnnnnnnnnnnnnnnnnnnnnnnnnnnnnnnnnnnnnnnnnnnnnnnnnnnnnnnnnnnnnnnnnnnnnnnnnnnnnnnnnnnnnnnnnnnnnnnnnnnnnnnnnnnnnnnnnnnnnnnnnnnnnnnnnnnnnnnnnnnnnnnnnnnnnnnnnnnnnnnnnnnnnnnnnnnnnnnnnnnnnnnnnnnnnnnnnnnnnnnnnnnnnnnnnnnnnnnnnnnnnnnnnnnnnnnnnnnnnnnnnnnnnnnnnnnnnnnnnnnnnnnnnnnnnnnnnnnnnnnnnnnnnnnnnnnnnnnnnnnnnnnnnnnnnnnnnnnnnnnnnnnnnnnnnnnnnnnnnnnnnnnnnnnnnnnnnnnnnnnnnnnnnnnnnnnnnnnnnnnnnnnnnnnnnnnnnnnnnnnnnnnnnnnnnnnnnnnnnnnnnnnnnnnnnnnnnnnnnnnnnnnnnnnnnnnnnnnnnnnnnnnnnnnnnnnnnnnnnnnnnnnnnnnnnnnnnnnnnnnnnnnnnnnnnnnnnnnnnnnnnnnnnnnnnnnnnnnnnnnnnnnnnnnnnnnnnnnnnnnnnnnnnnnnnnnnnnnnnnnnnnnnnnnnnnnnnnnnnnnnnnnnnnnnnnnnnnnnnnnnnnnnnnnnnnnnnnnnnnnnnnnnnnnnnnnnnnnnnnnnnnnnnnnnnnnnnnnnnnnnnnnnnnnnnnnnnnnnnnnnnnnnnnnnnnnnnnnnnnnnnnnnnnnnnnnnnnnnnnnnnnnnnnnnnnnnnnnnnnnnnnnnnnnnnnnnnnnnnnnnnnnnnnnnnnnnnnnnnnnnnnnnnnnnnnnnnnnnnnnnnnnnnnnnnnnnnnnnnnnnnnnnnnnnnnnnnnnnnnnnnnnnnnnnnnnnnnnnnnnnnnnnnnnnnnnnnnnnnnnnnnnnnnnnnnnnnnnnnnnnnnnnnnnnnnnnnnnnnnnnnnnnnnnnnnnnnnnnnnnnnnnnnnnnnnnnnnnnnnnnnnnnnnnnnnnnnnnnnnnnnnnnnnnnnnnnnnnnnnnnnnnnnnnnnnnnnnnnnnnnnnnnnnnnnnnnnnnnnnnnnnnnnnnnnnnnnnnnnnnnnnnnnnnnnnnnnnnnnnnnnnnnnnnnnnnnnnnnnnnnnnnnnnnnnnnnnnnnnnnnnnnnnnnnnnnnnnnnnnnnnnnnnnnnnnnnnnnnnnnnnnnnnnnnnnnnnnnnnnnnnnnnnnnnnnnnnnnnnnnnnnnnnnnnnnnnnnnnnnnnnnnnnnnnnnnnnnnnnnnnnnnnnnnnnnnnnnnnnnnnnnnnnnnnnnnnnnnnnnnnnnnnnnnnnnnnnnnnnnnnnnnnnnnnnnnnnnnnnnnnnnnnnnnnnnnnnnnnnnnnnnnnnnnnnnnnnnnnnnnnnnnnnnnnnnnnnnnnnnnnnnnnnnnnnnnnnnnnnnnnnnnnnnnnnnnnnnnnnnnnnnnnnnnnnnnnnnnnnnnnnnnnnnnnnnnnnnnnnnnnnnnnnnnnnnnnnnnnnnnnnnnnnnnnnnnnnnnnnnnnnnnnnnnnnnnnnnnnnnnnnnnnnnnnnnnnnnnnnnnnnnnnnnnnnnnnnnnnnnnnnnnnnnnnnnnnnnnnnnnnnnnnnnnnnnnnnnnnnnnnnnnnnnnnnnnnnnnnnnnnnnnnnnnnnnnnnnnnnnnnnnnnnnnnnnnnnnnnnnnnnnnnnnnnnnnnnnnnnnnnnnnnnnnnnnnnnnnnnnnnnnnnnnnnnnnnnnnnnnnnnnnnnnnnnnnnnnnnnnnnnnnnnnnnnnnnnnnnnnnnnnnnnnnnnnnnnnnnnnnnnnnnnnnnnnnnnnnnnnnnnnnnnnnnnnnnnnnnnnnnnnnnnnnnnnnnnnnnnnnnnnnnnnnnnnnnnnnnnnnnnnnnnnnnnnnnnnnnnnnnnnnnnnnnnnnnnnnnnnnnnnnnnnnnnnnnnnnnnnnnnnnnnnnnnnnnnnnnnnnnnnnnnnnnnnnnnnnnnnnnnnnnnnnnnnnnnnnnnnnnnnnnnnnnnnnnnnnnnnnnnnnnnnnnnnnnnnnnnnnnnnnnnnnnnnnnnnnnnnnnnnnnnnnnnnnnnnnnnnnnnnnnnnnnnnnnnnnnnnnnnnnnnnnnnnnnnnnnnnnnnnnnnnnnnnnnnnnnnnnnnnnnnnnnnnnnnnnnnnnnnnnnnnnnnnnnnnnnnnnnnnnnnnnnnnnnnnnnnnnnnnnnnnnnnnnnnnnnnnnnnnnnnnnnnnnnnnnnnnnnnnnnnnnnnnnnnnnnnnnnnnnnnnnnnnnnnnnnnnnnnnnnnnnnnnnnnnnnnnnnnnnnnnnnnnnnnnnnnnnnnnnnnnnnnnnnnnnnnnnnnnnnnnnnnnnnnnnnnnnnnnnnnnnnnnnnnnnnnnnnnnnnnnnnnnnnnnnnnnnnnnnnnnnnnnnnnnnnnnnnnnnnnnnnnnnnnnnnnnnnnnnnnnnnnnnnnnnnnnnnnnnnnnnnnnnnnnnnnnnnnnnnnnnnnnnnnnnnnnnnnnnnnnnnnnnnnnnnnnnnnnnnnnnnnnnnnnnnnnnnnnnnnnnnnnnnnnnnnnnnnnnnnnnnnnnnnnnnnnnnnnnnnnnnnnnnnnnnnnnnnnnnnnnnnnnnnnnnnnnnnnnnnnnnnnnnnnnnnnnnnnnnnnnnnnnnnnnnnnnnnnnnnnnnnnnnnnnnnnnnnnnnnnnnnnnnnnnnnnnnnnnnnnnnnnnnnnnnnnnnnnnnnnnnnnnnnnnnnnnnnnnnnnnnnnnnnnnnnnnnnnnnnnnnnnnnnnnnnnnnnnnnnnnnnnnnnnnnnnnnnnnnnnnnnnnnnnnnnnnnnnnnnnnnnnnnnnnnnnnnnnnnnnnnnnnnnnnnnnnnnnnnnnnnnnnnnnnnnnnnnnnnnnnnnnnnnnnnnnnnnnnnnnnnnnnnnnnnnnnnnnnnnnnnnnnnnnnnnnnnnnnnnnnnnnnnnnnnnnnnnnnnnnnnnnnnnnnnnnnnnnnnnnnnnnnnnnnnnnnnnnnnnnnnnnnnnnnnnnnnnnnnnnnnnnnnnnnnnnnnnnnnnnnnnnnnnnnnnnnnnnnnnnnnnnnnnnnnnnnnnnnnnnnnnnnnnnnnnnnnnnnnnnnnnnnnnnnnnnnnnnnnnnnnnnnnnnnnnnnnnnnnnnnnnnnnnnnnnnnnnnnnnnnnnnnnnnnnnnnnnnnnnnnnnnnnnnnnnnnnnnnnnnnnnnnnnnnnnnnnnnnnnnnnnnnnnnnnnnnnnnnnnnnnnnnnnnnnnnnnnnnnnnnnnnnnnnnnnnnnnnnnnnnnnnnnnnnnnnnnnnnnnnnnnnnnnnnnnnnnnnnnnnnnnnnnnnnnnnnnnnnnnnnnnnnnnnnnnnnnnnnnnnnnnnnnnnnnnnnnnnnnnnnnnnnnnnnnnnnnnnnnnnnnnnnnnnnnnnnnnnnnnnnnnnnnnnnnnnnnnnnnnnnnnnnnnnnnnnnnnnnnnnnnnnnnnnnnnnnnnnnnnnnnnnnnnnnnnnnnnnnnnnnnnnnnnnnnnnnnnnnnnnnnnnnnnnnnnnnnnnnnnnnnnnnnnnnnnnnnnnnnnnnnnnnnnnnnnnnnnnnnnnnnnnnnnnnnnnnnnnnnnnnnnnnnnnnnnnnnnnnnnnnnnnnnnnnnnnnnnnnnnnnnnnnnnnnnnnnnnnnnnnnnnnnnnnnnnnnnnnnnnnnnnnnnnnnnnnnnnnnnnnnnnnnnnnnnnnnnnnnnnnnnnnnnnnnnnnnnnnnnnnnnnnnnnnnnnnnnnnnnnnnnnnnnnnnnnnnnnnnnnnnnnnnnnnnnnnnnnnnnnnnnnnnnnnnnnnnnnnnnnnnnnnnnnnnnnnnnnnnnnnnnnnnnnnnnnnnnnnnnnnnnnnnnnnnnnnnnnnnnnnnnnnnnnnnnnnnnnnnnnnnnnnnnnnnnnnnnnnnnnnnnnnnnnnnnnnnnnnnnnnnnnnnnnnnnnnnnnnnnnnnnnnnnnnnnnnnnnnnnnnnnnnnnnnnnnnnnnnnnnnnnnnnnnnnnnnnnnnnnnnnnnnnnnnnnnnnnnnnnnnnnnnnnnnnnnnnnnnnnnnnnnnnnnnnnnnnnnnnnnnnnnnnnnnnnnnnnnnnnnnnnnnnnnnnnnnnnnnnnnnnnnnnnnnnnnnnnnnnnnnnnnnnnnnnnnnnnnnnnnnnnnnnnnnnnnnnnnnnnnnnnnnnnnnnnnnnnnnnnnnnnnnnnnnnnnnnnnnnnnnnnnnnnnnnnnnnnnnnnnnnnnnnnnnnnnnnnnnnnnnnnnnnnnnnnnnnnnnnnnnnnnnnnnnnnnnnnnnnnnnnnnnnnnnnnnnnnnnnnnnnnnnnnnnnnnnnnnnnnnnnnnnnnnnnnnnnnnnnnnnnnnnnnnnnnnnnnnnnnnnnnnnnnnnnnnnnnnnnnnnnnnnnnnnnnnnnnnnnnnnnnnnnnnnnnnnnnnnnnnnnnnnnnnnnnnnnnnnnnnnnnnnnnnnnnnnnnnnnnnnnnnnnnnnnnnnnnnnnnnnnnnnnnnnnnnnnnnnnnnnnnnnnnnnnnnnnnnnnnnnnnnnnnnnnnnnnnnnnnnnnnnnnnnnnnnnnnnnnnnnnnnnnnnnnnnnnnnnnnnnnnnnnnnnnnnnnnnnnnnnnnnnnnnnnnnnnnnnnnnnnnnnnnnnnnnnnnnnnnnnnnnnnnnnnnnnnnnnnnnnnnnnnnnnnnnnnnnnnnnnnnnnnnnnnnnnnnnnnnnnnnnnnnnnnnnnnnnnnnnnnnnnnnnnnnnnnnnnnnnnnnnnnnnnnnnnnnnnnnnnnnnnnnnnnnnnnnnnnnnnnnnnnnnnnnnnnnnnnnnnnnnnnnnnnnnnnnnnnnnnnnnnnnnnnnnnnnnnnnnnnnnnnnnnnnnnnnnnnnnnnnnnnnnnnnnnnnnnnnnnnnnnnnnnnnnnnnnnnnnnnnnnnnnnnnnnnnnnnnnnnnnnnnnnnnnnnnnnnnnnnnnnnnnnnnnnnnnnnnnnnnnnnnnnnnnnnnnnnnnnnnnnnnnnnnnnnnnnnnnnnnnnnnnnnnnnnnnnnnnnnnnnnnnnnnnnnnnnnnnnnnnnnnnnnnnnnnnnnnnnnnnnnnnnnnnnnnnnnnnnnnnnnnnnnnnnnnnnnnnnnnnnnnnnnnnnnnnnnnnnnnnnnnnnnnnnnnnnnnnnnnnnnnnnnnnnnnnnnnnnnnnnnnnnnnnnnnnnnnnnnnnnnnnnnnnnnnnnnnnnnnnnnnnnnnnnnnnnnnnnnnnnnnnnnnnnnnnnnnnnnnnnnnnnnnnnnnnnnnnnnnnnnnnnnnnnnnnnnnnnnnnnnnnnnnnnnnnnnnnnnnnnnnnnnnnnnnnnnnnnnnnnnnnnnnnnnnnnnnnnnnnnnnnnnnnnnnnnnnnnnnnnnnnnnnnnnnnnnnnnnnnnnnnnnnnnnnnnnnnnnnnnnnnnnnnnnnnnnnnnnnnnnnnnnnnnnnnnnnnnnnnnnnnnnnnnnnnnnnnnnnnnnnnnnnnnnnnnnnnnnnnnnnnnnnnnnnnnnnnnnnnnnnnnnnnnnnnnnnnnnnnnnnnnnnnnnnnnnnnnnnnnnnnnnnnnnnnnnnnnnnnnnnnnnnnnnnnnnnnnnnnnnnnnnnnnnnnnnnnnnnnnnnnnnnnnnnnnnnnnnnnnnnnnnnnnnnnnnnnnnnnnnnnnnnnnnnnnnnnnnnnnnnnnnnnnnnnnnnnnnnnnnnnnnnnnnnnnnnnnnnnnnnnnnnnnnnnnnnnnnnnnnnnnnnnnnnnnnnnnnnnnnnnnnnnnnnnnnnnnnnnnnnnnnnnnnnnnnnnnnnnnnnnnnnnnnnnnnnnnnnnnnnnnnnnnnnnnnnnnnnnnnnnnnnnnnnnnnnnnnnnnnnnnnnnnnnnnnnnnnnnnnnnnnnnnnnnnnnnnnnnnnnnnnnnnnnnnnnnnnnnnnnnnnnnnnnnnnnnnnnnnnnnnnnnnnnnnnnnnnnnnnnnnnnnnnnnnnnnnnnnnnnnnnnnnnnnnnnnnnnnnnnnnnnnnnnnnnnnnnnnnnnnnnnnnnnnnnnnnnnnnnnnnnnnnnnnnnnnnnnnnnnnnnnnnnnnnnnnnnnnnnnnnnnnnnnnnnnnnnnnnnnnnnnnnnnnnnnnnnnnnnnnnnnnnnnnnnnnnnnnnnnnnnnnnnnnnnnnnnnnnnnnnnnnnnnnnnnnnnnnnnnnnnnnnnnnnnnnnnnnnnnnnnnnnnnnnnnnnnnnnnnnnnnnnnnnnnnnnnnnnnnnnnnnnnnnnnnnnnnnnnnnnnnnnnnnnnnnnnnnnnnnnnnnnnnnnnnnnnnnnnnnnnnnnnnnnnnnnnnnnnnnnnnnnnnnnnnnnnnnnnnnnnnnnnnnnnnnnnnnnnnnnnnnnnnnnnnnnnnnnnnnnnnnnnnnnnnnnnnnnnnnnnnnnnnnnnnnnnnnnnnnnnnnnnnnnnnnnnnnnnnnnnnnnnnnnnnnnnnnnnnnnnnnnnnnnnnnnnnnnnnnnnnnnnnnnnnnnnnnnnnnnnnnnnnnnnnnnnnnnnnnnnnnnnnnnnnnnnnnnnnnnnnnnnnnnnnnnnnnnnnnnnnnnnnnnnnnnnnnnnnnnnnnnnnnnnnnnnnnnnnnnnnnnnnnnnnnnnnnnnnnnnnnnnnnnnnnnnnnnnnnnnnnnnnnnnnnnnnnnnnnnnnnnnnnnnnnnnnnnnnnnnnnnnnnnnnnnnnnnnnnnnnnnnnnnnnnnnnnnnnnnnnnnnnnnnnnnnnnnnnnnnnnnnnnnnnnnnnnnnnnnnnnnnnnnnnnnnnnnnnnnnnnnnnnnnnnnnnnnnnnnnnnnnnnnnnnnnnnnnnnnnnnnnnnnnnnnnnnnnnnnnnnnnnnnnnnnnnnnnnnnnnnnnnnnnnnnnnnnnnnnnnnnnnnnnnnnnnnnnnnnnnnnnnnnnnnnnnnnnnnnnnnnnnnnnnnnnnnnnnnnnnnnnnnnnnnnnnnnnnnnnnnnnnnnnnnnnnnnnnnnnnnnnnnnnnnnnnnnnnnnnnnnnnnnnnnnnnnnnnnnnnnnnnnnnnnnnnnnnnnnnnnnnnnnnnnnnnnnnnnnnnnnnnnnnnnnnnnnnnnnnnnnnnnnnnnnnnnnnnnnnnnnnnnnnnnnnnnnnnnnnnnnnnnnnnnnnnnnnnnnnnnnnnnnnnnnnnnnnnnnnnnnnnnnnnnnnnnnnnnnnnnnnnnnnnnnnnnnnnnnnnnnnnnnnnnnnnnnnnnnnnnnnnnnnnnnnnnnnnnnnnnnnnnnnnnnnnnnnnnnnnnnnnnnnnnnnnnnnnnnnnnnnnnnnnnnnnnnnnnnnnnnnnnnnnnnnnnnnnnnnnnnnnnnnnnnnnnnnnnnnnnnnnnnnnnnnnnnnnnnnnnnnnnnnnnnnnnnnnnnnnnnnnnnnnnnnnnnnnnnnnnnnnnnnnnnnnnnnnnnnnnnnnnnnnnnnnnnnnnnnnnnnnnnnnnnnnnnnnnnnnnnnnnnnnnnnnnnnnnnnnnnnnnnnnnnnnnnnnnnnnnnnnnnnnnnnnnnnnnnnnnnnnnnnnnnnnnnnnnnnnnnnnnnnnnnnnnnnnnnnnnnnnnnnnnnnnnnnnnnnnnnnnnnnnnnnnnnnnnnnnnnnnnnnnnnnnnnnnnnnnnnnnnnnnnnnnnnnnnnnnnnnnnnnnnnnnnnnnnnnnnnnnnnnnnnnnnnnnnnnnnnnnnnnnnnnnnnnnnnnnnnnnnnnnnnnnnnnnnnnnnnnnnnnnnnnnnnnnnnnnnnnnnnnnnnnnnnnnnnnnnnnnnnnnnnnnnnnnnnnnnnnnnnnnnnnnnnnnnnnnnnnnnnnnnnnnnnnnnnnnnnnnnnnnnnnnnnnnnnnnnnnnnnnnnnnnnnnnnnnnnnnnnnnnnnnnnnnnnnnnnnnnnnnnnnnnnnnnnnnnnnnnnnnnnnnnnnnnnnnnnnnnnnnnnnnnnnnnnnnnnnnnnnnnnnnnnnnnnnnnnnnnnnnnnnnnnnnnnnnnnnnnnnnnnnnnnnnnnnnnnnnnnnnnnnnnnnnnnnnnnnnnnnnnnnnnnnnnnnnnnnnnnnnnnnnnnnnnnnnnnnnnnnnnnnnnnnnnnnnnnnnnnnnnnnnnnnnnnnnnnnnnnnnnnnnnnnnnnnnnnnnnnnnnnnnnnnnnnnnnnnnnnnnnnnnnnnnnnnnnnnnnnnnnnnnnnnnnnnnnnnnnnnnnnnnnnnnnnnnnnnnnnnnnnnnnnnnnnnnnnnnnnnnnnnnnnnnnnnnnnnnnnnnnnnnnnnnnnnnnnnnnnnnnnnnnnnnnnnnnnnnnnnnnnnnnnnnnnnnnnnnnnnnnnnnnnnnnnnnnnnnnnnnnnnnnnnnnnnnnnnnnnnnnnnnnnnnnnnnnnnnnnnnnnnnnnnnnnnnnnnnnnnnnnnnnnnnnnnnnnnnnnnnnnnnnnnnnnnnnnnnnnnnnnnnnnnnnnnnnnnnnnnnnnnnnnnnnnnnnnnnnnnnnnnnnnnnnnnnnnnnnnnnnnnnnnnnnnnnnnnnnnnnnnnnnnnnnnnnnnnnnnnnnnnnnnnnnnnnnnnnnnnnnnnnnnnnnnnnnnnnnnnnnnnnnnnnnnnnnnnnnnnnnnnnnnnnnnnnnnnnnnnnnnnnnnnnnnnnnnnnnnnnnnnnnnnnnnnnnnnnnnnnnnnnnnnnnnnnnnnnnnnnnnnnnnnnnnnnnnnnnnnnnnnnnnnnnnnnnnnnnnnnnnnnnnnnnnnnnnnnnnnnnnnnnnnnnnnnnnnnnnnnnnnnnnnnnnnnnnnnnnnnnnnnnnnnnnnnnnnnnnnnnnnnnnnnnnnnnnnnnnnnnnnnnnnnnnnnnnnnnnnnnnnnnnnnnnnnnnnnnnnnnnnnnnnnnnnnnnnnnnnnnnnnnnnnnnnnnnnnnnnnnnnnnnnnnnnnnnnnnnnnnnnnnnnnnnnnnnnnnnnnnnnnnnnnnnnnnnnnnnnnnnnnnnnnnnnnnnnnnnnnnnnnnnnnnnnnnnnnnnnnnnnnnnnnnnnnnnnnnnnnnnnnnnnnnnnnnnnnnnnnnnnnnnnnnnnnnnnnnnnnnnnnnnnnnnnnnnnnnnnnnnnnnnnnnnnnnnnnnnnnnnnnnnnnnnnnnnnnnnnnnnnnnnnnnnnnnnnnnnnnnnnnnnnnnnnnnnnnnnnnnnnnnnnnnnnnnnnnnnnnnnnnnnnnnnnnnnnnnnnnnnnnnnnnnnnnnnnnnnnnnnnnnnnnnnnnnnnnnnnnnnnnnnnnnnnnnnnnnnnnnnnnnnnnnnnnnnnnnnnnnnnnnnnnnnnnnnnnnnnnnnnnnnnnnnnnnnnnnnnnnnnnnnnnnnnnnnnnnnnnnnnnnnnnnnnnnnnnnnnnnnnnnnnnnnnnnnnnnnnnnnnnnnnnnnnnnnnnnnnnnnnnnnnnnnnnnnnnnnnnnnnnnnnnnnnnnnnnnnnnnnnnnnnnnnnnnnnnnnnnnnnnnnnnnnnnnnnnnnnnnnnnnnnnnnnnnnnnnnnnnnnnnnnnnnnnnnnnnnnnnnnnnnnnnnnnnnnnnnnnnnnnnnnnnnnnnnnnnnnnnnnnnnnnnnnnnnnnnnnnnnnnnnnnnnnnnnnnnnnnnnnnnnnnnnnnnnnnnnnnnnnnnnnnnnnnnnnnnnnnnnnnnnnnnnnnnnnnnnnnnnnnnnnnnnnnnnnnnnnnnnnnnnnnnnnnnnnnnnnnnnnnnnnnnnnnnnnnnnnnnnnnnnnnnnnnnnnnnnnnnnnnnnnnnnnnnnnnnnnnnnnnnnnnnnnnnnnnnnnnnnnnnnnnnnnnnnnnnnnnnnnnnnnnnnnnnnnnnnnnnnnnnnnnnnnnnnnnnnnnnnnnnnnnnnnnnnnnnnnnnnnnnnnnnnnnnnnnnnnnnnnnnnnnnnnnnnnnnnnnnnnnnnnnnnnnnnnnnnnnnnnnnnnnnnnnnnnnnnnnnnnnnnnnnnnnnnnnnnnnnnnnnnnnnnnnnnnnnnnnnnnnnnnnnnnnnnnnnnnnnnnnnnnnnnnnnnnnnnnnnnnnnnnnnnnnnnnnnnnnnnnnnnnnnnnnnnnnnnnnnnnnnnnnnnnnnnnnnnnnnnnnnnnnnnnnnnnnnnnnnnnnnnnnnnnnnnnnnnnnnnnnnnnnnnnnnnnnnnnnnnnnnnnnnnnnnnnnnnnnnnnnnnnnnnnnnnnnnnnnnnnnnnnnnnnnnnnnnnnnnnnnnnnnnnnnnnnnnnnnnnnnnnnnnnnnnnnnnnnnnnnnnnnnnnnnnnnnnnnnnnnnnnnnnnnnnnnnnnnnnnnnnnnnnnnnnnnnnnnnnnnnnnnnnnnnnnnnnnnnnnnnnnnnnnnnnnnnnnnnnnnnnnnnnnnnnnnnnnnnnnnnnnnnnnnnnnnnnnnnnnnnnnnnnnnnnnnnnnnnnnnnnnnnnnnnnnnnnnnnnnnnnnnnnnnnnnnnnnnnnnnnnnnnnnnnnnnnnnnnnnnnnnnnnnnnnnnnnnnnnnnnnnnnnnnnnnnnnnnnnnnnnnnnnnnnnnnnnnnnnnnnnnnnnnnnnnnnnnnnnnnnnnnnnnnnnnnnnnnnnnnnnnnnnnnnnnnnnnnnnnnnnnnnnnnnnnnnnnnnnnnnnnnnnnnnnnnnnnnnnnnnnnnnnnnnnnnnnnnnnnnnnnnnnnnnnnnnnnnnnnnnnnnnnnnnnnnnnnnnnnnnnnnnnnnnnnnnnnnnnnnnnnnnnnnnnnnnnnnnnnnnnnnnnnnnnnnnnnnnnnnnnnnnnnnnnnnnnnnnnnnnnnnnnnnnnnnnnnnnnnnnnnnnnnnnnnnnnnnnnnnnnnnnnnnnnnnnnnnnnnnnnnnnnnnnnnnnnnnnnnnnnnnnnnnnnnnnnnnnnnnnnnnnnnnnnnnnnnnnnnnnnnnnnnnnnnnnnnnnnnnnnnnnnnnnnnnnnnnnnnnnnnnnnnnnnnnnnnnnnnnnnnnnnnnnnnnnnnnnnnnnnnnnnnnnnnnnnnnnnnnnnnnnnnnnnnnnnnnnnnnnnnnnnnnnnnnnnnnnnnnnnnnnnnnnnnnnnnnnnnnnnnnnnnnnnnnnnnnnnnnnnnnnnnnnnnnnnnnnnnnnnnnnnnnnnnnnnnnnnnnnnnnnnnnnnnnnnnnnnnnnnnnnnnnnnnnnnnnnnnnnnnnnnnnnnnnnnnnnnnnnnnnnnnnnnnnnnnnnnnnnnnnnnnnnnnnnnnnnnnnnnnnnnnnnnnnnnnnnnnnnnnnnnnnnnnnnnnnnnnnnnnnnnnnnnnnnnnnnnnnnnnnnnnnnnnnnnnnnnnnnnnnnnnnnnnnnnnnnnnnnnnnnnnnnnnnnnnnnnnnnnnnnnnnnnnnnnnnnnnnnnnnnnnnnnnnnnnnnnnnnnnnnnnnnnnnnnnnnnnnnnnnnnnnnnnnnnnnnnnnnnnnnnnnnnnnnnnnnnnnnnnnnnnnnnnnnnnnnnnnnnnnnnnnnnnnnnnnnnnnnnnnnnnnnnnnnnnnnnnnnnnnnnnnnnnnnnnnnnnnnnnnnnnnnnnnnnnnnnnnnnnnnnnnnnnnnnnnnnnnnnnnnnnnnnnnnnnnnnnnnnnnnnnnnnnnnnnnnnnnnnnnnnnnnnnnnnnnnnnnnnnnnnnnnnnnnnnnnnnnnnnnnnnnnnnnnnnnnnnnnnnnnnnnnnnnnnnnnnnnnnnnnnnnnnnnnnnnnnnnnnnnnnnnnnnnnnnnnnnnnnnnnnnnnnnnnnnnnnnnnnnnnnnnnnnnnnnnnnnnnnnnnnnnnnnnnnnnnnnnnnnnnnnnnnnnnnnnnnnnnnnnnnnnnnnnnnnnnnnnnnnnnnnnnnnnnnnnnnnnnnnnnnnnnnnnnnnnnnnnnnnnnnnnnnnnnnnnnnnnnnnnnnnnnnnnnnnnnnnnnnnnnnnnnnnnnnnnnnnnnnnnnnnnnnnnnnnnnnnnnnnnnnnnnnnnnnnnnnnnnnnnnnnnnnnnnnnnnnnnnnnnnnnnnnnnnnnnnnnnnnnnnnnnnnnnnnnnnnnnnnnnnnnnnnnnnnnnnnnnnnnnnnnnnnnnnnnnnnnnnnnnnnnnnnnnnnnnnnnnnnnnnnnnnnnnnnnnnnnnnnnnnnnnnnnnnnnnnnnnnnnnnnnnnnnnnnnnnnnnnnnnnnnnnnnnnnnnnnnnnnnnnnnnnnnnnnnnnnnnnnnnnnnnnnnnnnnnnnnnnnnnnnnnnnnnnnnnnnnnnnnnnnnnnnnnnnnnnnnnnnnnnnnnnnnnnnnnnnnnnnnnnnnnnnnnnnnnnnnnnnnnnnnnnnnnnnnnnnnnnnnnnnnnnnnnnnnnnnnnnnnnnnnnnnnnnnnnnnnnnnnnnnnnnnnnnnnnnnnnnnnnnnnnnnnnnnnnnnnnnnnnnnnnnnnnnnnnnnnnnnnnnnnnnnnnnnnnnnnnnnnnnnnnnnnnnnnnnnnnnnnnnnnnnnnnnnnnnnnnnnnnnnnnnnnnnnnnnnnnnnnnnnnnnnnnnnnnnnnnnnnnnnnnnnnnnnnnnnnnnnnnnnnnnnnnnnnnnnnnnnnnnnnnnnnnnnnnnnnnnnnnnnnnnnnnnnnnnnnnnnnnnnnnnnnnnnnnnnnnnnnnnnnnnnnnnnnnnnnnnnnnnnnnnnnnnnnnnnnnnnnnnnnnnnnnnnnnnnnnnnnnnnnnnnnnnnnnnnnnnnnnnnnnnnnnnnnnnnnnnnnnnnnnnnnnnnnnnnnnnnnnnnnnnnnnnnnnnnnnnnnnnnnnnnnnnnnnnnnnnnnnnnnnnnnnnnnnnnnnnnnnnnnnnnnnnnnnnnnnnnnnnnnnnnnnnnnnnnnnnnnnnnnnnnnnnnnnnnnnnnnnnnnnnnnnnnnnnnnnnnnnnnnnnnnnnnnnnnnnnnnnnnnnnnnnnnnnnnnnnnnnnnnnnnnnnnnnnnnnnnnnnnnnnnnnnnnnnnnnnnnnnnnnnnnnnnnnnnnnnnnnnnnnnnnnnnnnnnnnnnnnnnnnnnnnnnnnnnnnnnnnnnnnnnnnnnnnnnnnnnnnnnnnnnnnnnnnnnnnnnnnnnnnnnnnnnnnnnnnnnnnnnnnnnnnnnnnnnnnnnnnnnnnnnnnnnnnnnnnnnnnnnnnnnnnnnnnnnnnnnnnnnnnnnnnnnnnnnnnnnnnnnnnnnnnnnnnnnnnnnnnnnnnnnnnnnnnnnnnnnnnnnnnnnnnnnnnnnnnnnnnnnnnnnnnnnnnnnnnnnnnnnnnnnnnnnnnnnnnnnnnnnnnnnnnnnnnnnnnnnnnnnnnnnnnnnnnnnnnnnnnnnnnnnnnnnnnnnnnnnnnnnnnnnnnnnnnnnnnnnnnnnnnnnnnnnnnnnnnnnnnnnnnnnnnnnnnnnnnnnnnnnnnnnnnnnnnnnnnnnnnnnnnnnnnnnnnnnnnnnnnnnnnnnnnnnnnnnnnnnnnnnnnnnnnnnnnnnnnnnnnnnnnnnnnnnnnnnnnnnnnnnnnnnnnnnnnnnnnnnnnnnnnnnnnnnnnnnnnnnnnnnnnnnnnnnnnnnnnnnnnnnnnnnnnnnnnnnnnnnnnnnnnnnnnnnnnnnnnnnnnnnnnnnnnnnnnnnnnnnnnnnnnnnnnnnnnnnnnnnnnnnnnnnnnnnnnnnnnnnnnnnnnnnnnnnnnnnnnnnnnnnnnnnnnnnnnnnnnnnnnnnnnnnnnnnnnnnnnnnnnnnnnnnnnnnnnnnnnnnnnnnnnnnnnnnnnnnnnnnnnnnnnnnnnnnnnnnnnnnnnnnnnnnnnnnnnnnnnnnnnnnnnnnnnnnnnnnnnnnnnnnnnnnnnnnnnnnnnnnnnnnnnnnnnnnnnnnnnnnnnnnnnnnnnnnnnnnnnnnnnnnnnnnnnnnnnnnnnnnnnnnnnnnnnnnnnnnnnnnnnnnnnnnnnnnnnnnnnnnnnnnnnnnnnnnnnnnnnnnnnnnnnnnnnnnnnnnnnnnnnnnnnnnnnnnnnnnnnnnnnnnnnnnnnnnnnnnnnnnnnnnnnnnnnnnnnnnnnnnnnnnnnnnnnnnnnnnnnnnnnnnnnnnnnnnnnnnnnnnnnnnnnnnnnnnnnnnnnnnnnnnnnnnnnnnnnnnnnnnnnnnnnnnnnnnnnnnnnnnnnnnnnnnnnnnnnnnnnnnnnnnnnnnnnnnnnnnnnnnnnnnnnnnnnnnnnnnnnnnnnnnnnnnnnnnnnnnnnnnnnnnnnnnnnnnnnnnnnnnnnnnnnnnnnnnnnnnnnnnnnnnnnnnnnnnnnnnnnnnnnnnnnnnnnnnnnnnnnnnnnnnnnnnnnnnnnnnnnnnnnnnnnnnnnnnnnnnnnnnnnnnnnnnnnnnnnnnnnnnnnnnnnnnnnnnnnnnnnnnnnnnnnnnnnnnnnnnnnnnnnnnnnnnnnnnnnnnnnnnnnnnnnnnnnnnnnnnnnnnnnnnnnnnnnnnnnnnnnnnnnnnnnnnnnnnnnnnnnnnnnnnnnnnnnnnnnnnnnnnnnnnnnnnnnnnnnnnnnnnnnnnnnnnnnnnnnnnnnnnnnnnnnnnnnnnnnnnnnnnnnnnnnnnnnnnnnnnnnnnnnnnnnnnnnnnnnnnnnnnnnnnnnnnnnnnnnnnnnnnnnnnnnnnnnnnnnnnnnnnnnnnnnnnnnnnnnnnnnnnnnnnnnnnnnnnnnnnnnnnnnnnnnnnnnnnnnnnnnnnnnnnnnnnnnnnnnnnnnnnnnnnnnnnnnnnnnnnnnnnnnnnnnnnnnnnnnnnnnnnnnnnnnnnnnnnnnnnnnnnnnnnnnnnnnnnnnnnnnnnnnnnnnnnnnnnnnnnnnnnnnnnnnnnnnnnnnnnnnnnnnnnnnnnnnnnnnnnnnnnnnnnnnnnnnnnnnnnnnnnnnnnnnnnnnnnnnnnnnnnnnnnnnnnnnnnnnnnnnnnnnnnnnnnnnnnnnnnnnnnnnnnnnnnnnnnnnnnnnnnnnnnnnnnnnnnnnnnnnnnnnnnnnnnnnnnnnnnnnnnnnnnnnnnnnnnnnnnnnnnnnnnnnnnnnnnnnnnnnnnnnnnnnnnnnnnnnnnnnnnnnnnnnnnnnnnnnnnnnnnnnnnnnnnnnnnnnnnnnnnnnnnnnnnnnnnnnnnnnnnnnnnnnnnnnnnnnnnnnnnnnnnnnnnnnnnnnnnnnnnnnnnnnnnnnnnnnnnnnnnnnnnnnnnnnnnnnnnnnnnnnnnnnnnnnnnnnnnnnnnnnnnnnnnnnnnnnnnnnnnnnnnnnnnnnnnnnnnnnnnnnnnnnnnnnnnnnnnnnnnnnnnnnnnnnnnnnnnnnnnnnnnnnnnnnnnnnnnnnnnnnnnnnnnnnnnnnnnnnnnnnnnnnnnnnnnnnnnnnnnnnnnnnnnnnnnnnnnnnnnnnnnnnnnnnnnnnnnnnnnnnnnnnnnnnnnnnnnnnnnnnnnnnnnnnnnnnnnnnnnnnnnnnnnnnnnnnnnnnnnnnnnnnnnnnnnnnnnnnnnnnnnnnnnnnnnnnnnnnnnnnnnnnnnnnnnnnnnnnnnnnnnnnnnnnnnnnnnnnnnnnnnnnnnnnnnnnnnnnnnnnnnnnnnnnnnnnnnnnnnnnnnnnnnnnnnnnnnnnnnnnnnnnnnnnnnnnnnnnnnnnnnnnnnnnnnnnnnnnnnnnnnnnnnnnnnnnnnnnnnnnnnnnnnnnnnnnnnnnnnnnnnnnnnnnnnnnnnnnnnnnnnnnnnnnnnnnnnnnnnnnnnnnnnnnnnnnnnnnnnnnnnnnnnnnnnnnnnnnnnnnnnnnnnnnnnnnnnnnnnnnnnnnnnnnnnnnnnnnnnnnnnnnnnnnnnnnnnnnnnnnnnnnnnnnnnnnnnnnnnnnnnnnnnnnnnnnnnnnnnnnnnnnnnnnnnnnnnnnnnnnnnnnnnnnnnnnnnnnnnnnnnnnnnnnnnnnnnnnnnnnnnnnnnnnnnnnnnnnnnnnnnnnnnnnnnnnnnnnnnnnnnnnnnnnnnnnnnnnnnnnnnnnnnnnnnnnnnnnnnnnnnnnnnnnnnnnnnnnnnnnnnnnnnnnnnnnnnnnnnnnnnnnnnnnnnnnnnnnnnnnnnnnnnnnnnnnnnnnnnnnnnnnnnnnnnnnnnnnnnnnnnnnnnnnnnnnnnnnnnnnnnnnnnnnnnnnnnnnnnnnnnnnnnnnnnnnnnnnnnnnnnnnnnnnnnnnnnnnnnnnnnnnnnnnnnnnnnnnnnnnnnnnnnnnnnnnnnnnnnnnnnnnnnnnnnnnnnnnnnnnnnnnnnnnnnnnnnnnnnnnnnnnnnnnnnnnnnnnnnnnnnnnnnnnnnnnnnnnnnnnnnnnnnnnnnnnnnnnnnnnnnnnnnnnnnnnnnnnnnnnnnnnnnnnnnnnnnnnnnnnnnnnnnnnnnnnnnnnnnnnnnnnnnnnnnnnnnnnnnnnnnnnnnnnnnnnnnnnnnnnnnnnnnnnnnnnnnnnnnnnnnnnnnnnnnnnnnnnnnnnnnnnnnnnnnnnnnnnnnnnnnnnnnnnnnnnnnnnnnnnnnnnnnnnnnnnnnnnnnnnnnnnnnnnnnnnnnnnnnnnnnnnnnnnnnnnnnnnnnnnnnnnnnnnnnnnnnnnnnnnnnnnnnnnnnnnnnnnnnnnnnnnnnnnnnnnnnnnnnnnnnnnnnnnnnnnnnnnnnnnnnnnnnnnnnnnnnnnnnnnnnnnnnnnnnnnnnnnnnnnnnnnnnnnnnnnnnnnnnnnnnnnnnnnnnnnnnnnnnnnnnnnnnnnnnnnnnnnnnnnnnnnnnnnnnnnnnnnnnnnnnnnnnnnnnnnnnnnnnnnnnnnnnnnnnnnnnnnnnnnnnnnnnnnnnnnnnnnnnnnnnnnnnnnnnnnnnnnnnnnnnnnnnnnnnnnnnnnnnnnnnnnnnnnnnnnnnnnnnnnnnnnnnnnnnnnnnnnnnnnnnnnnnnnnnnnnnnnnnnnnnnnnnnnnnnnnnnnnnnnnnnnnnnnnnnnnnnnnnnnnnnnnnnnnnnnnnnnnnnnnnnnnnnnnnnnnnnnnnnnnnnnnnnnnnnnnnnnnnnnnnnnnnnnnnnnnnnnnnnnnnnnnnnnnnnnnnnnnnnnnnnnnnnnnnnnnnnnnnnnnnnnnnnnnnnnnnnnnnnnnnnnnnnnnnnnnnnnnnnnnnnnnnnnnnnnnnnnnnnnnnnnnnnnnnnnnnnnnnnnnnnnnnnnnnnnnnnnnnnnnnnnnnnnnnnnnnnnnnnnnnnnnnnnnnnnnnnnnnnnnnnnnnnnnnnnnnnnnnnnnnnnnnnnnnnnnnnnnnnnnnnnnnnnnnnnnnnnnnnnnnnnnnnnnnnnnnnnnnnnnnnnnnnnnnnnnnnnnnnnnnnnnnnnnnnnnnnnnnnnnnnnnnnnnnnnnnnnnnnnnnnnnnnnnnnnnnnnnnnnnnnnnnnnnnnnnnnnnnnnnnnnnnnnnnnnnnnnnnnnnnnnnnnnnnnnnnnnnnnnnnnnnnnnnnnnnnnnnnnnnnnnnnnnnnnnnnnnnnnnnnnnnnnnnnnnnnnnnnnnnnnnnnnnnnnnnnnnnnnnnnnnnnnnnnnnnnnnnnnnnnnnnnnnnnnnnnnnnnnnnnnnnnnnnnnnnnnnnnnnnnnnnnnnnnnnnnnnnnnnnnnnnnnnnnnnnnnnnnnnnnnnnnnnnnnnnnnnnnnnnnnnnnnnnnnnnnnnnnnnnnnnnnnnnnnnnnnnnnnnnnnnnnnnnnnnnnnnnnnnnnnnnnnnnnnnnnnnnnnnnnnnnnnnnnnnnnnnnnnnnnnnnnnnnnnnnnnnnnnnnnnnnnnnnnnnnnnnnnnnnnnnnnnnnnnnnnnnnnnnnnnnnnnnnnnnnnnnnnnnnnnnnnnnnnnnnnnnnnnnnnnnnnnnnnnnnnnnnnnnnnnnnnnnnnnnnnnnnnnnnnnnnnnnnnnnnnnnnnnnnnnnnnnnnnnnnnnnnnnnnnnnnnnnnnnnnnnnnnnnnnnnnnnnnnnnnnnnnnnnnnnnnnnnnnnnnnnnnnnnnnnnnnnnnnnnnnnnnnnnnnnnnnnnnnnnnnnnnnnnnnnnnnnnnnnnnnnnnnnnnnnnnnnnnnnnnnnnnnnnnnnnnnnnnnnnnnnnnnnnnnnnnnnnnnnnnnnnnnnnnnnnnnnnnnnnnnnnnnnnnnnnnnnnnnnnnnnnnnnnnnnnnnnnnnnnnnnnnnnnnnnnnnnnnnnnnnnnnnnnnnnnnnnnnnnnnnnnnnnnnnnnnnnnnnnnnnnnnnnnnnnnnnnnnnnnnnnnnnnnnnnnnnnnnnnnnnnnnnnnnnnnnnnnnnnnnnnnnnnnnnnnnnnnnnnnnnnnnnnnnnnnnnnnnnnnnnnnnnnnnnnnnnnnnnnnnnnnnnnnnnnnnnnnnnnnnnnnnnnnnnnnnnnnnnnnnnnnnnnnnnnnnnnnnnnnnnnnnnnnnnnnnnnnnnnnnnnnnnnnnnnnnnnnnnnnnnnnnnnnnnnnnnnnnnnnnnnnnnnnnnnnnnnnnnnnnnnnnnnnnnnnnnnnnnnnnnnnnnnnnnnnnnnnnnnnnnnnnnnnnnnnnnnnnnnnnnnnnnnnnnnnnnnnnnnnnnnnnnnnnnnnnnnnnnnnnnnnnnnnnnnnnnnnnnnnnnnnnnnnnnnnnnnnnnnnnnnnnnnnnnnnnnnnnnnnnnnnnnnnnnnnnnnnnnnnnnnnnnnnnnnnnnnnnnnnnnnnnnnnnnnnnnnnnnnnnnnnnnnnnnnnnnnnnnnnnnnnnnnnnnnnnnnnnnnnnnnnnnnnnnnnnnnnnnnnnnnnnnnnnnnnnnnnnnnnnnnnnnnnnnnnnnnnnnnnnnnnnnnnnnnnnnnnnnnnnnnnnnnnnnnnnnnnnnnnnnnnnnnnnnnnnnnnnnnnnnnnnnnnnnnnnnnnnnnnnnnnnnnnnnnnnnnnnnnnnnnnnnnnnnnnnnnnnnnnnnnnnnnnnnnnnnnnnnnnnnnnnnnnnnnnnnnnnnnnnnnnnnnnnnnnnnnnnnnnnnnnnnnnnnnnnnnnnnnnnnnnnnnnnnnnnnnnnnnnnnnnnnnnnnnnnnnnnnnnnnnnnnnnnnnnnnnnnnnnnnnnnnnnnnnnnnnnnnnnnnnnnnnnnnnnnnnnnnnnnnnnnnnnnnnnnnnnnnnnnnnnnnnnnnnnnnnnnnnnnnnnnnnnnnnnnnnnnnnnnnnnnnnnnnnnnnnnnnnnnnnnnnnnnnnnnnnnnnnnnnnnnnnnnnnnnnnnnnnnnnnnnnnnnnnnnnnnnnnnnnnnnnnnnnnnnnnnnnnnnnnnnnnnnnnnnnnnnnnnnnnnnnnnnnnnnnnnnnnnnnnnnnnnnnnnnnnnnnnnnnnnnnnnnnnnnnnnnnnnnnnnnnnnnnnnnnnnnnnnnnnnnnnnnnnnnnnnnnnnnnnnnnnnnnnnnnnnnnnnnnnnnnnnnnnnnnnnnnnnnnnnnnnnnnnnnnnnnnnnnnnnnnnnnnnnnnnnnnnnnnnnnnnnnnnnnnnnnnnnnnnnnnnnnnnnnnnnnnnnnnnnnnnnnnnnnnnnnnnnnnnnnnnnnnnnnnnnnnnnnnnnnnnnnnnnnnnnnnnnnnnnnnnnnnnnnnnnnnnnnnnnnnnnnnnnnnnnnnnnnnnnnnnnnnnnnnnnnnnnnnnnnnnnnnnnnnnnnnnnnnnnnnnnnnnnnnnnnnnnnnnnnnnnnnnnnnnnnnnnnnnnnnnnnnnnnnnnnnnnnnnnnnnnnnnnnnnnnnnnnnnnnnnnnnnnnnnnnnnnnnnnnnnnnnnnnnnnnnnnnnnnnnnnnnnnnnnnnnnnnnnnnnnnnnnnnnnnnnnnnnnnnnnnnnnnnnnnnnnnnnnnnnnnnnnnnnnnnnnnnnnnnnnnnnnnnnnnnnnnnnnnnnnnnnnnnnnnnnnnnnnnnnnnnnnnnnnnnnnnnnnnnnnnnnnnnnnnnnnnnnnnnnnnnnnnnnnnnnnnnnnnnnnnnnnnnnnnnnnnnnnnnnnnnnnnnnnnnnnnnnnnnnnnnnnnnnnnnnnnnnnnnnnnnnnnnnnnnnnnnnnnnnnnnnnnnnnnnnnnnnnnnnnnnnnnnnnnnnnnnnnnnnnnnnnnnnnnnnnnnnnnnnnnnnnnnnnnnnnnnnnnnnnnnnnnnnnnnnnnnnnnnnnnnnnnnnnnnnnnnnnnnnnnnnnnnnnnnnnnnnnnnnnnnnnnnnnnnnnnnnnnnnnnnnnnnnnnnnnnnnnnnnnnnnnnnnnnnnnnnnnnnnnnnnnnnnnnnnnnnnnnnnnnnnnnnnnnnnnnnnnnnnnnnnnnnnnnnnnnnnnnnnnnnnnnnnnnnnnnnnnnnnnnnnnnnnnnnnnnnnnnnnnnnnnnnnnnnnnnnnnnnnnnnnnnnnnnnnnnnnnnnnnnnnnnnnnnnnnnnnnnnnnnnnnnnnnnnnnnnnnnnnnnnnnnnnnnnnnnnnnnnnnnnnnnnnnnnnnnnnnnnnnnnnnnnnnnnnnnnnnnnnnnnnnnnnnnnnnnnnnnnnnnnnnnnnnnnnnnnnnnnnnnnnnnnnnnnnnnnnnnnnnnnnnnnnnnnnnnnnnnnnnnnnnnnnnnnnnnnnnnnnnnnnnnnnnnnnnnnnnnnnnnnnnnnnnnnnnnnnnnnnnnnnnnnnnnnnnnnnnnnnnnnnnnnnnnnnnnnnnnnnnnnnnnnnnnnnnnnnnnnnnnnnnnnnnnnnnnnnnnnnnnnnnnnnnnnnnnnnnnnnnnnnnnnnnnnnnnnnnnnnnnnnnnnnnnnnnnnnnnnnnnnnnnnnnnnnnnnnnnnnnnnnnnnnnnnnnnnnnnnnnnnnnnnnnnnnnnnnnnnnnnnnnnnnnnnnnnnnnnnnnnnnnnnnnnnnnnnnnnnnnnnnnnnnnnnnnnnnnnnnnnnnnnnnnnnnnnnnnnnnnnnnnnnnnnnnnnnnnnnnnnnnnnnnnnnnnnnnnnnnnnnnnnnnnnnnnnnnnnnnnnnnnnnnnnnnnnnnnnnnnnnnnnnnnnnnnnnnnnnnnnnnnnnnnnnnnnnnnnnnnnnnnnnnnnnnnnnnnnnnnnnnnnnnnnnnnnnnnnnnnnnnnnnnnnnnnnnnnnnnnnnnnnnnnnnnnnnnnnnnnnnnnnnnnnnnnnnnnnnnnnnnnnnnnnnnnnnnnnnnnnnnnnnnnnnnnnnnnnnnnnnnnnnnnnnnnnnnnnnnnnnnnnnnnnnnnnnnnnnnnnnnnnnnnnnnnnnnnnnnnnnnnnnnnnnnnnnnnnnnnnnnnnnnnnnnnnnnnnnnnnnnnnnnnnnnnnnnnnnnnnnnnnnnnnnnnnnnnnnnnnnnnnnnnnnnnnnnnnnnnnnnnnnnnnnnnnnnnnnnnnnnnnnnnnnnnnnnnnnnnnnnnnnnnnnnnnnnnnnnnnnnnnnnnnnnnnnnnnnnnnnnnnnnnnnnnnnnnnnnnnnnnnnnnnnnnnnnnnnnnnnnnnnnnnnnnnnnnnnnnnnnnnnnnnnnnnnnnnnnnnnnnnnnnnnnnnnnnnnnnnnnnnnnnnnnnnnnnnnnnnnnnnnnnnnnnnnnnnnnnnnnnnnnnnnnnnnnnnnnnnnnnnnnnnnnnnnnnnnnnnnnnnnnnnnnnnnnnnnnnnnnnnnnnnnnnnnnnnnnnnnnnnnnnnnnnnnnnnnnnnnnnnnnnnnnnnnnnnnnnnnnnnnnnnnnnnnnnnnnnnnnnnnnnnnnnnnnnnnnnnnnnnnnnnnnnnnnnnnnnnnnnnnnnnnnnnnnnnnnnnnnnnnnnnnnnnnnnnnnnnnnnnnnnnnnnnnnnnnnnnnnnnnnnnnnnnnnnnnnnnnnnnnnnnnnnnnnnnnnnnnnnnnnnnnnnnnnnnnnnnnnnnnnnnnnnnnnnnnnnnnnnnnnnnnnnnnnnnnnnnnnnnnnnnnnnnnnnnnnnnnnnnnnnnnnnnnnnnnnnnnnnnnnnnnnnnnnnnnnnnnnnnnnnnnnnnnnnnnnnnnnnnnnnnnnnnnnnnnnnnnnnnnnnnnnnnnnnnnnnnnnnnnnnnnnnnnnnnnnnnnnnnnnnnnnnnnnnnnnnnnnnnnnnnnnnnnnnnnnnnnnnnnnnnnnnnnnnnnnnnnnnnnnnnnnnnnnnnnnnnnnnnnnnnnnnnnnnnnnnnnnnnnnnnnnnnnnnnnnnnnnnnnnnnnnnnnnnnnnnnnnnnnnnnnnnnnnnnnnnnnnnnnnnnnnnnnnnnnnnnnnnnnnnnnnnnnnnnnnnnnnnnnnnnnnnnnnnnnnnnnnnnnnnnnnnnnnnnnnnnnnnnnnnnnnnnnnnnnnnnnnnnnnnnnnnnnnnnnnnnnnnnnnnnnnnnnnnnnnnnnnnnnnnnnnnnnnnnnnnnnnnnnnnnnnnnnnnnnnnnnnnnnnnnnnnnnnnnnnnnnnnnnnnnnnnnnnnnnnnnnnnnnnnnnnnnnnnnnnnnnnnnnnnnnnnnnnnnnnnnnnnnnnnnnnnnnnnnnnnnnnnnnnnnnnnnnnnnnnnnnnnnnnnnnnnnnnnnnnnnnnnnnnnnnnnnnnnnnnnnnnnnnnnnnnnnnnnnnnnnnnnnnnnnnnnnnnnnnnnnnnnnnnnnnnnnnnnnnnnnnnnnnnnnnnnnnnnnnnnnnnnnnnnnnnnnnnnnnnnnnnnnnnnnnnnnnnnnnnnnnnnnnnnnnnnnnnnnnnnnnnnnnnnnnnnnnnnnnnnnnnnnnnnnnnnnnnnnnnnnnnnnnnnnnnnnnnnnnnnnnnnnnnnnnnnnnnnnnnnnnnnnnnnnnnnnnnnnnnnnnnnnnnnnnnnnnnnnnnnnnnnnnnnnnnnnnnnnnnnnnnnnnnnnnnnnnnnnnnnnnnnnnnnnnnnnnnnnnnnnnnnnnnnnnnnnnnnnnnnnnnnnnnnnnnnnnnnnnnnnnnnnnnnnnnnnnnnnnnnnnnnnnnnnnnnnnnnnnnnnnnnnnnnnnnnnnnnnnnnnnnnnnnnnnnnnnnnnnnnnnnnnnnnnnnnnnnnnnnnnnnnnnnnnnnnnnnnnnnnnnnnnnnnnnnnnnnnnnnnnnnnnnnnnnnnnnnnnnnnnnnnnnnnnnnnnnnnnnnnnnnnnnnnnnnnnnnnnnnnnnnnnnnnnnnnnnnnnnnnnnnnnnnnnnnnnnnnnnnnnnnnnnnnnnnnnnnnnnnnnnnnnnnnnnnnnnnnnnnnnnnnnnnnnnnnnnnnnnnnnnnnnnnnnnnnnnnnnnnnnnnnnnnnnnnnnnnnnnnnnnnnnnnnnnnnnnnnnnnnnnnnnnnnnnnnnnnnnnnnnnnnnnnnnnnnnnnnnnnnnnnnnnnnnnnnnnnnnnnnnnnnnnnnnnnnnnnnnnnnnnnnnnnnnnnnnnnnnnnnnnnnnnnnnnnnnnnnnnnnnnnnnnnnnnnnnnnnnnnnnnnnnnnnnnnnnnnnnnnnnnnnnnnnnnnnnnnnnnnnnnnnnnnnnnnnnnnnnnnnnnnnnnnnnnnnnnnnnnnnnnnnnnnnnnnnnnnnnnnnnnnnnnnnnnnnnnnnnnnnnnnnnnnnnnnnnnnnnnnnnnnnnnnnnnnnnnnnnnnnnnnnnnnnnnnnnnnnnnnnnnnnnnnnnnnnnnnnnnnnnnnnnnnnnnnnnnnnnnnnnnnnnnnnnnnnnnnnnnnnnnnnnnnnnnnnnnnnnnnnnnnnnnnnnnnnnnnnnnnnnnnnnnnnnnnnnnnnnnnnnnnnnnnnnnnnnnnnnnnnnnnnnnnnnnnnnnnnnnnnnnnnnnnnnnnnnnnnnnnnnnnnnnnnnnnnnnnnnnnnnnnnnnnnnnnnnnnnnnnnnnnnnnnnnnnnnnnnnnnnnnnnnnnnnnnnnnnnnnnnnnnnnnnnnnnnnnnnnnnnnnnnnnnnnnnnnnnnnnnnnnnnnnnnnnnnnnnnnnnnnnnnnnnnnnnnnnnnnnnnnnnnnnnnnnnnnnnnnnnnnnnnnnnnnnnnnnnnnnnnnnnnnnnnnnnnnnnnnnnnnnnnnnnnnnnnnnnnnnnnnnnnnnnnnnnnnnnnnnnnnnnnnnnnnnnnnnnnnnnnnnnnnnnnnnnnnnnnnnnnnnnnnnnnnnnnnnnnnnnnnnnnnnnnnnnnnnnnnnnnnnnnnnnnnnnnnnnnnnnnnnnnnnnnnnnnnnnnnnnnnnnnnnnnnnnnnnnnnnnnnnnnnnnnnnnnnnnnnnnnnnnnnnnnnnnnnnnnnnnnnnnnnnnnnnnnnnnnnnnnnnnnnnnnnnnnnnnnnnnnnnnnnnnnnnnnnnnnnnnnnnnnnnnnnnnnnnnnnnnnnnnnnnnnnnnnnnnnnnnnnnnnnnnnnnnnnnnnnnnnnnnnnnnnnnnnnnnnnnnnnnnnnnnnnnnnnnnnnnnnnnnnnnnnnnnnnnnnnnnnnnnnnnnnnnnnnnnnnnnnnnnnnnnnnnnnnnnnnnnnnnnnnnnnnnnnnnnnnnnnnnnnnnnnnnnnnnnnnnnnnnnnnnnnnnnnnnnnnnnnnnnnnnnnnnnnnnnnnnnnnnnnnnnnnnnnnnnnnnnnnnnnnnnnnnnnnnnnnnnnnnnnnnnnnnnnnnnnnnnnnnnnnnnnnnnnnnnnnnnnnnnnnnnnnnnnnnnnnnnnnnnnnnnnnnnnnnnnnnnnnnnnnnnnnnnnnnnnnnnnnnnnnnnnnnnnnnnnnnnnnnnnnnnnnnnnnnnnnnnnnnnnnnnnnnnnnnnnnnnnnnnnnnnnnnnnnnnnnnnnnnnnnnnnnnnnnnnnnnnnnnnnnnnnnnnnnnnnnnnnnnnnnnnnnnnnnnnnnnnnnnnnnnnnnnnnnnnnnnnnnnnnnnnnnnnnnnnnnnnnnnnnnnnnnnnnnnnnnnnnnnnnnnnnnnnnnnnnnnnnnnnnnnnnnnnnnnnnnnnnnnnnnnnnnnnnnnnnnnnnnnnnnnnnnnnnnnnnnnnnnnnnnnnnnnnnnnnnnnnnnnnnnnnnnnnnnnnnnnnnnnnnnnnnnnnnnnnnnnnnnnnnnnnnnnnnnnnnnnnnnnnnnnnnnnnnnnnnnnnnnnnnnnnnnnnnnnnnnnnnnnnnnnnnnnnnnnnnnnnnnnnnnnnnnnnnnnnnnnnnnnnnnnnnnnnnnnnnnnnnnnnnnnnnnnnnnnnnnnnnnnnnnnnnnnnnnnnnnnnnnnnnnnnnnnnnnnnnnnnnnnnnnnnnnnnnnnnnnnnnnnnnnnnnnnnnnnnnnnnnnnnnnnnnnnnnnnnnnnnnnnnnnnnnnnnnnnnnnnnnnnnnnnnnnnnnnnnnnnnnnnnnnnnnnnnnnnnnnnnnnnnnnnnnnnnnnnnnnnnnnnnnnnnnnnnnnnnnnnnnnnnnnnnnnnnnnnnnnnnnnnnnnnnnnnnnnnnnnnnnnnnnnnnnnnnnnnnnnnnnnnnnnnnnnnnnnnnnnnnnnnnnnnnnnnnnnnnnnnnnnnnnnnnnnnnnnnnnnnnnnnnnnnnnnnnnnnnnnnnnnnnnnnnnnnnnnnnnnnnnnnnnnnnnnnnnnnnnnnnnnnnnnnnnnnnnnnnnnnnnnnnnnnnnnnnnnnnnnnnnnnnnnnnnnnnnnnnnnnnnnnnnnnnnnnnnnnnnnnnnnnnnnnnnnnnnnnnnnnnnnnnnnnnnnnnnnnnnnnnnnnnnnnnnnnnnnnnnnnnnnnnnnnnnnnnnnnnnnnnnnnnnnnnnnnnnnnnnnnnnnnnnnnnnnnnnnnnnnnnnnnnnnnnnnnnnnnnnnnnnnnnnnnnnnnnnnnnnnnnnnnnnnnnnnnnnnnnnnnnnnnnnnnnnnnnnnnnnnnnnnnnnnnnnnnnnnnnnnnnnnnnnnnnnnnnnnnnnnnnnnnnnnnnnnnnnnnnnnnnnnnnnnnnnnnnnnnnnnnnnnnnnnnnnnnnnnnnnnnnnnnnnnnnnnnnnnnnnnnnnnnnnnnnnnnnnnnnnnnnnnnnnnnnnnnnnnnnnnnnnnnnnnnnnnnnnnnnnnnnnnnnnnnnnnnnnnnnnnnnnnnnnnnnnnnnnnnnnnnnnnnnnnnnnnnnnnnnnnnnnnnnnnnnnnnnnnnnnnnnnnnnnnnnnnnnnnnnnnnnnnnnnnnnnnnnnnnnnnnnnnnnnnnnnnnnnnnnnnnnnnnnnnnnnnnnnnnnnnnnnnnnnnnnnnnnnnnnnnnnnnnnnnnnnnnnnnnnnnnnnnnnnnnnnnnnnnnnnnnnnnnnnnnnnnnnnnnnnnnnnnnnnnnnnnnnnnnnnnnnnnnnnnnnnnnnnnnnnnnnnnnnnnnnnnnnnnnnnnnnnnnnnnnnnnnnnnnnnnnnnnnnnnnnnnnnnnnnnnnnnnnnnnnnnnnnnnnnnnnnnnnnnnnnnnnnnnnnnnnnnnnnnnnnnnnnnnnnnnnnnnnnnnnnnnnnnnnnnnnnnnnnnnnnnnnnnnnnnnnnnnnnnnnnnnnnnnnnnnnnnnnnnnnnnnnnnnnnnnnnnnnnnnnnnnnnnnnnnnnnnnnnnnnnnnnnnnnnnnnnnnnnnnnnnnnnnnnnnnnnnnnnnnnnnnnnnnnnnnnnnnnnnnnnnnnnnnnnnnnnnnnnnnnnnnnnnnnnnnnnnnnnnnnnnnnnnnnnnnnnnnnnnnnnnnnnnnnnnnnnnnnnnnnnnnnnnnnnnnnnnnnnnnnnnnnnnnnnnnnnnnnnnnnnnnnnnnnnnnnnnnnnnnnnnnnnnnnnnnnnnnnnnnnnnnnnnnnnnnnnnnnnnnnnnnnnnnnnnnnnnnnnnnnnnnnnnnnnnnnnnnnnnnnnnnnnnnnnnnnnnnnnnnnnnnnnnnnnnnnnnnnnnnnnnnnnnnnnnnnnnnnnnnnnnnnnnnnnnnnnnnnnnnnnnnnnnnnnnnnnnnnnnnnnnnnnnnnnnnnnnnnnnnnnnnnnnnnnnnnnnnnnnnnnnnnnnnnnnnnnnnnnnnnnnnnnnnnnnnnnnnnnnnnnnnnnnnnnnnnnnnnnnnnnnnnnnnnnnnnnnnnnnnnnnnnnnnnnnnnnnnnnnnnnnnnnnnnnnnnnnnnnnnnnnnnnnnnnnnnnnnnnnnnnnnnnnnnnnnnnnnnnnnnnnnnnnnnnnnnnnnnnnnnnnnnnnnnnnnnnnnnnnnnnnnnnnnnnnnnnnnnnnnnnnnnnnnnnnnnnnnnnnnnnnnnnnnnnnnnnnnnnnnnnnnnnnnnnnnnnnnnnnnnnnnnnnnnnnnnnnnnnnnnnnnnnnnnnnnnnnnnnnnnnnnnnnnnnnnnnnnnnnnnnnnnnnnnnnnnnnnnnnnnnnnnnnnnnnnnnnnnnnnnnnnnnnnnnnnnnnnnnnnnnnnnnnnnnnnnnnnnnnnnnnnnnnnnnnnnnnnnnnnnnnnnnnnnnnnnnnnnnnnnnnnnnnnnnnnnnnnnnnnnnnnnnnnnnnnnnnnnnnnnnnnnnnnnnnnnnnnnnnnnnnnnnnnnnnnnnnnnnnnnnnnnnnnnnnnnnnnnnnnnnnnnnnnnnnnnnnnnnnnnnnnnnnnnnnnnnnnnnnnnnnnnnnnnnnnnnnnnnnnnnnnnnnnnnnnnnnnnnnnnnnnnnnnnnnnnnnnnnnnnnnnnnnnnnnnnnnnnnnnnnnnnnnnnnnnnnnnnnnnnnnnnnnnnnnnnnnnnnnnnnnnnnnnnnnnnnnnnnnnnnnnnnnnnnnnnnnnnnnnnnnnnnnnnnnnnnnnnnnnnnnnnnnnnnnnnnnnnnnnnnnnnnnnnnnnnnnnnnnnnnnnnnnnnnnnnnnnnnnnnnnnnnnnnnnnnnnnnnnnnnnnnnnnnnnnnnnnnnnnnnnnnnnnnnnnnnnnnnnnnnnnnnnnnnnnnnnnnnnnnnnnnnnnnnnnnnnnnnnnnnnnnnnnnnnnnnnnnnnnnnnnnnnnnnnnnnnnnnnnnnnnnnnnnnnnnnnnnnnnnnnnnnnnnnnnnnnnnnnnnnnnnnnnnnnnnnnnnnnnnnnnnnnnnnnnnnnnnnnnnnnnnnnnnnnnnnnnnnnnnnnnnnnnnnnnnnnnnnnnnnnnnnnnnnnnnnnnnnnnnnnnnnnnnnnnnnnnnnnnnnnnnnnnnnnnnnnnnnnnnnnnnnnnnnnnnnnnnnnnnnnnnnnnnnnnnnnnnnnnnnnnnnnnnnnnnnnnnnnnnnnnnnnnnnnnnnnnnnnnnnnnnnnnnnnnnnnnnnnnnnnnnnnnnnnnnnnnnnnnnnnnnnnnnnnnnnnnnnnnnnnnnnnnnnnnnnnnnnnnnnnnnnnnnnnnnnnnnnnnnnnnnnnnnnnnnnnnnnnnnnnnnnnnnnnnnnnnnnnnnnnnnnnnnnnnnnnnnnnnnnnnnnnnnnnnnnnnnnnnnnnnnnnnnnnnnnnnnnnnnnnnnnnnnnnnnnnnnnnnnnnnnnnnnnnnnnnnnnnnnnnnnnnnnnnnnnnnnnnnnnnnnnnnnnnnnnnnnnnnnnnnnnnnnnnnnnnnnnnnnnnnnnnnnnnnnnnnnnnnnnnnnnnnnnnnnnnnnnnnnnnnnnnnnnnnnnnnnnnnnnnnnnnnnnnnnnnnnnnnnnnnnnnnnnnnnnnnnnnnnnnnnnnnnnnnnnnnnnnnnnnnnnnnnnnnnnnnnnnnnnnnnnnnnnnnnnnnnnnnnnnnnnnnnnnnnnnnnnnnnnnnnnnnnnnnnnnnnnnnnnnnnnnnnnnnnnnnnnnnnnnnnnnnnnnnnnnnnnnnnnnnnnnnnnnnnnnnnnnnnnnnnnnnnnnnnnnnnnnnnnnnnnnnnnnnnnnnnnnnnnnnnnnnnnnnnnnnnnnnnnnnnnnnnnnnnnnnnnnnnnnnnnnnnnnnnnnnnnnnnnnnnnnnnnnnnnnnnnnnnnnnnnnnnnnnnnnnnnnnnnnnnnnnnnnnnnnnnnnnnnnnnnnnnnnnnnnnnnnnnnnnnnnnnnnnnnnnnnnnnnnnnnnnnnnnnnnnnnnnnnnnnnnnnnnnnnnnnnnnnnnnnnnnnnnnnnnnnnnnnnnnnnnnnnnnnnnnnnnnnnnnnnnnnnnnnnnnnnnnnnnnnnnnnnnnnnnnnnnnnnnnnnnnnnnnnnnnnnnnnnnnnnnnnnnnnnnnnnnnnnnnnnnnnnnnnnnnnnnnnnnnnnnnnnnnnnnnnnnnnnnnnnnnnnnnnnnnnnnnnnnnnnnnnnnnnnnnnnnnnnnnnnnnnnnnnnnnnnnnnnnnnnnnnnnnnnnnnnnnnnnnnnnnnnnnnnnnnnnnnnnnnnnnnnnnnnnnnnnnnnnnnnnnnnnnnnnnnnnnnnnnnnnnnnnnnnnnnnnnnnnnnnnnnnnnnnnnnnnnnnnnnnnnnnnnnnnnnnnnnnnnnnnnnnnnnnnnnnnnnnnnnnnnnnnnnnnnnnnnnnnnnnnnnnnnnnnnnnnnnnnnnnnnnnnnnnnnnnnnnnnnnnnnnnnnnnnnnnnnnnnnnnnnnnnnnnnnnnnnnnnnnnnnnnnnnnnnnnnnnnnnnnnnnnnnnnnnnnnnnnnnnnnnnnnnnnnnnnnnnnnnnnnnnnnnnnnnnnnnnnnnnnnnnnnnnnnnnnnnnnnnnnnnnnnnnnnnnnnnnnnnnnnnnnnnnnnnnnnnnnnnnnnnnnnnnnnnnnnnnnnnnnnnnnnnnnnnnnnnnnnnnnnnnnnnnnnnnnnnnnnnnnnnnnnnnnnnnnnnnnnnnnnnnnnnnnnnnnnnnnnnnnnnnnnnnnnnnnnnnnnnnnnnnnnnnnnnnnnnnnnnnnnnnnnnnnnnnnnnnnnnnnnnnnnnnnnnnnnnnnnnnnnnnnnnnnnnnnnnnnnnnnnnnnnnnnnnnnnnnnnnnnnnnnnnnnnnnnnnnnnnnnnnnnnnnnnnnnnnnnnnnnnnnnnnnnnnnnnnnnnnnnnnnnnnnnnnnnnnnnnnnnnnnnnnnnnnnnnnnnnnnnnnnnnnnnnnnnnnnnnnnnnnnnnnnnnnnnnnnnnnnnnnnnnnnnnnnnnnnnnnnnnnnnnnnnnnnnnnnnnnnnnnnnnnnnnnnnnnnnnnnnnnnnnnnnnnnnnnnnnnnnnnnnnnnnnnnnnnnnnnnnnnnnnnnnnnnnnnnnnnnnnnnnnnnnnnnnnnnnnnnnnnnnnnnnnnnnnnnnnnnnnnnnnnnnnnnnnnnnnnnnnnnnnnnnnnnnnnnnnnnnnnnnnnnnnnnnnnnnnnnnnnnnnnnnnnnnnnnnnnnnnnnnnnnnnnnnnnnnnnnnnnnnnnnnnnnnnnnnnnnnnnnnnnnnnnnnnnnnnnnnnnnnnnnnnnnnnnnnnnnnnnnnnnnnnnnnnnnnnnnnnnnnnnnnnnnnnnnnnnnnnnnnnnnnnnnnnnnnnnnnnnnnnnnnnnnnnnnnnnnnnnnnnnnnnnnnnnnnnnnnnnnnnnnnnnnnnnnnnnnnnnnnnnnnnnnnnnnnnnnnnnnnnnnnnnnnnnnnnnnnnnnnnnnnnnnnnnnnnnnnnnnnnnnnnnnnnnnnnnnnnnnnnnnnnnnnnnnnnnnnnnnnnnnnnnnnnnnnnnnnnnnnnnnnnnnnnnnnnnnnnnnnnnnnnnnnnnnnnnnnnnnnnnnnnnnnnnnnnnnnnnnnnnnnnnnnnnnnnnnnnnnnnnnnnnnnnnnnnnnnnnnnnnnnnnnnnnnnnnnnnnnnnnnnnnnnnnnnnnnnnnnnnnnnnnnnnnnnnnnnnnnnnnnnnnnnnnnnnnnnnnnnnnnnnnnnnnnnnnnnnnnnnnnnnnnnnnnnnnnnnnnnnnnnnnnnnnnnnnnnnnnnnnnnnnnnnnnnnnnnnnnnnnnnnnnnnnnnnnnnnnnnnnnnnnnnnnnnnnnnnnnnnnnnnnnnnnnnnnnnnnnnnnnnnnnnnnnnnnnnnnnnnnnnnnnnnnnnnnnnnnnnnnnnnnnnnnnnnnnnnnnnnnnnnnnnnnnnnnnnnnnnnnnnnnnnnnnnnnnnnnnnnnnnnnnnnnnnnnnnnnnnnnnnnnnnnnnnnnnnnnnnnnnnnnnnnnnnnnnnnnnnnnnnnnnnnnnnnnnnnnnnnnnnnnnnnnnnnnnnnnnnnnnnnnnnnnnnnnnnnnnnnnnnnnnnnnnnnnnnnnnnnnnnnnnnnnnnnnnnnnnnnnnnnnnnnnnnnnnnnnnnnnnnnnnnnnnnnnnnnnnnnnnnnnnnnnnnnnnnnnnnnnnnnnnnnnnnnnnnnnnnnnnnnnnnnnnnnnnnnnnnnnnnnnnnnnnnnnnnnnnnnnnnnnnnnnnnnnnnnnnnnnnnnnnnnnnnnnnnnnnnnnnnnnnnnnnnnnnnnnnnnnnnnnnnnnnnnnnnnnnnnnnnnnnnnnnnnnnnnnnnnnnnnnnnnnnnnnnnnnnnnnnnnnnnnnnnnnnnnnnnnnnnnnnnnnnnnnnnnnnnnnnnnnnnnnnnnnnnnnnnnnnnnnnnnnnnnnnnnnnnnnnnnnnnnnnnnnnnnnnnnnnnnnnnnnnnnnnnnnnnnnnnnnnnnnnnnnnnnnnnnnnnnnnnnnnnnnnnnnnnnnnnnnnnnnnnnnnnnnnnnnnnnnnnnnnnnnnnnnnnnnnnnnnnnnnnnnnnnnnnnnnnnnnnnnnnnnnnnnnnnnnnnnnnnnnnnnnnnnnnnnnnnnnnnnnnnnnnnnnnnnnnnnnnnnnnnnnnnnnnnnnnnnnnnnnnnnnnnnnnnnnnnnnnnnnnnnnnnnnnnnnnnnnnnnnnnnnnnnnnnnnnnnnnnnnnnnnnnnnnnnnnnnnnnnnnnnnnnnnnnnnnnnnnnnnnnnnnnnnnnnnnnnnnnnnnnnnnnnnnnnnnnnnnnnnnnnnnnnnnnnnnnnnnnnnnnnnnnnnnnnnnnnnnnnnnnnnnnnnnnnnnnnnnnnnnnnnnnnnnnnnnnnnnnnnnnnnnnnnnnnnnnnnnnnnnnnnnnnnnnnnnnnnnnnnnnnnnnnnnnnnnnnnnnnnnnnnnnnnnnnnnnnnnnnnnnnnnnnnnnnnnnnnnnnnnnnnnnnnnnnnnnnnnnnnnnnnnnnnnnnnnnnnnnnnnnnnnnnnnnnnnnnnnnnnnnnnnnnnnnnnnnnnnnnnnnnnnnnnnnnnnnnnnnnnnnnnnnnnnnnnnnnnnnnnnnnnnnnnnnnnnnnnnnnnnnnnnnnnnnnnnnnnnnnnnnnnnnnnnnnnnnnnnnnnnnnnnnnnnnnnnnnnnnnnnnnnnnnnnnnnnnnnnnnnnnnnnnnnnnnnnnnnnnnnnnnnnnnnnnnnnnnnnnnnnnnnnnnnnnnnnnnnnnnnnnnnnnnnnnnnnnnnnnnnnnnnnnnnnnnnnnnnnnnnnnnnnnnnnnnnnnnnnnnnnnnnnnnnnnnnnnnnnnnnnnnnnnnnnnnnnnnnnnnnnnnnnnnnnnnnnnnnnnnnnnnnnnnnnnnnnnnnnnnnnnnnnnnnnnnnnnnnnnnnnnnnnnnnnnnnnnnnnnnnnnnnnnnnnnnnnnnnnnnnnnnnnnnnnnnnnnnnnnnnnnnnnnnnnnnnnnnnnnnnnnnnnnnnnnnnnnnnnnnnnnnnnnnnnnnnnnnnnnnnnnnnnnnnnnnnnnnnnnnnnnnnnnnnnnnnnnnnnnnnnnnnnnnnnnnnnnnnnnnnnnnnnnnnnnnnnnnnnnnnnnnnnnnnnnnnnnnnnnnnnnnnnnnnnnnnnnnnnnnnnnnnnnnnnnnnnnnnnnnnnnnnnnnnnnnnnnnnnnnnnnnnnnnnnnnnnnnnnnnnnnnnnnnnnnnnnnnnnnnnnnnnnnnnnnnnnnnnnnnnnnnnnnnnnnnnnnnnnnnnnnnnnnnnnnnnnnnnnnnnnnnnnnnnnnnnnnnnnnnnnnnnnnnnnnnnnnnnnnnnnnnnnnnnnnnnnnnnnnnnnnnnnnnnnnnnnnnnnnnnnnnnnnnnnnnnnnnnnnnnnnnnnnnnnnnnnnnnnnnnnnnnnnnnnnnnnnnnnnnnnnnnnnnnnnnnnnnnnnnnnnnnnnnnnnnnnnnnnnnnnnnnnnnnnnnnnnnnnnnnnnnnnnnnnnnnnnnnnnnnnnnnnnnnnnnnnnnnnnnnnnnnnnnnnnnnnnnnnnnnnnnnnnnnnnnnnnnnnnnnnnnnnnnnnnnnnnnnnnnnnnnnnnnnnnnnnnnnnnnnnnnnnnnnnnnnnnnnnnnnnnnnnnnnnnnnnnnnnnnnnnnnnnnnnnnnnnnnnnnnnnnnnnnnnnnnnnnnnnnnnnnnnnnnnnnnnnnnnnnnnnnnnnnnnnnnnnnnnnnnnnnnnnnnnnnnnnnnnnnnnnnnnnnnnnnnnnnnnnnnnnnnnnnnnnnnnnnnnnnnnnnnnnnnnnnnnnnnnnnnnnnnnnnnnnnnnnnnnnnnnnnnnnnnnnnnnnnnnnnnnnnnnnnnnnnnnnnnnnnnnnnnnnnnnnnnnnnnnnnnnnnnnnnnnnnnnnnnnnnnnnnnnnnnnnnnnnnnnnnnnnnnnnnnnnnnnnnnnnnnnnnnnnnnnnnnnnnnnnnnnnnnnnnnnnnnnnnnnnnnnnnnnnnnnnnnnnnnnnnnnnnnnnnnnnnnnnnnnnnnnnnnnnnnnnnnnnnnnnnnnnnnnnnnnnnnnnnnnnnnnnnnnnnnnnnnnnnnnnnnnnnnnnnnnnnnnnnnnnnnnnnnnnnnnnnnnnnnnnnnnnnnnnnnnnnnnnnnnnnnnnnnnnnnnnnnnnnnnnnnnnnnnnnnnnnnnnnnnnnnnnnnnnnnnnnnnnnnnnnnnnnnnnnnnnnnnnnnnnnnnnnnnnnnnnnnnnnnnnnnnnnnnnnnnnnnnnnnnnnnnnnnnnnnnnnnnnnnnnnnnnnnnnnnnnnnnnnnnnnnnnnnnnnnnnnnnnnnnnnnnnnnnnnnnnnnnnnnnnnnnnnnnnnnnnnnnnnnnnnnnnnnnnnnnnnnnnnnnnnnnnnnnnnnnnnnnnnnnnnnnnnnnnnnnnnnnnnnnnnnnnnnnnnnnnnnnnnnnnnnnnnnnnnnnnnnnnnnnnnnnnnnnnnnnnnnnnnnnnnnnnnnnnnnnnnnnnnnnnnnnnnnnnnnnnnnnnnnnnnnnnnnnnnnnnnnnnnnnnnnnnnnnnnnnnnnnnnnnnnnnnnnnnnnnnnnnnnnnnnnnnnnnnnnnnnnnnnnnnnnnnnnnnnnnnnnnnnnnnnnnnnnnnnnnnnnnnnnnnnnnnnnnnnnnnnnnnnnnnnnnnnnnnnnnnnnnnnnnnnnnnnnnnnnnnnnnnnnnnnnnnnnnnnnnnnnnnnnnnnnnnnnnnnnnnnnnnnnnnnnnnnnnnnnnnnnnnnnnnnnnnnnnnnnnnnnnnnnnnnnnnnnnnnnnnnnnnnnnnnnnnnnnnnnnnnnnnnnnnnnnnnnnnnnnnnnnnnnnnnnnnnnnnnnnnnnnnnnnnnnnnnnnnnnnnnnnnnnnnnnnnnnnnnnnnnnnnnnnnnnnnnnnnnnnnnnnnnnnnnnnnnnnnnnnnnnnnnnnnnnnnnnnnnnnnnnnnnnnnnnnnnnnnnnnnnnnnnnnnnnnnnnnnnnnnnnnnnnnnnnnnnnnnnnnnnnnnnnnnnnnnnnnnnnnnnnnnnnnnnnnnnnnnnnnnnnnnnnnnnnnnnnnnnnnnnnnnnnnnnnnnnnnnnnnnnnnnnnnnnnnnnnnnnnnnnnnnnnnnnnnnnnnnnnnnnnnnnnnnnnnnnnnnnnnnnnnnnnnnnnnnnnnnnnnnnnnnnnnnnnnnnnnnnnnnnnnnnnnnnnnnnnnnnnnnnnnnnnnnnnnnnnnnnnnnnnnnnnnnnnnnnnnnnnnnnnnnnnnnnnnnnnnnnnnnnnnnnnnnnnnnnnnnnnnnnnnnnnnnnnnnnnnnnnnnnnnnnnnnnnnnnnnnnnnnnnnnnnnnnnnnnnnnnnnnnnnnnnnnnnnnnnnnnnnnnnnnnnnnnnnnnnnnnnnnnnnnnnnnnnnnnnnnnnnnnnnnnnnnnnnnnnnnnnnnnnnnnnnnnnnnnnnnnnnnnnnnnnnnnnnnnnnnnnnnnnnnnnnnnnnnnnnnnnnnnnnnnnnnnnnnnnnnnnnnnnnnnnnnnnnnnnnnnnnnnnnnnnnnnnnnnnnnnnnnnnnnnnnnnnnnnnnnnnnnnnnnnnnnnnnnnnnnnnnnnnnnnnnnnnnnnnnnnnnnnnnnnnnnnnnnnnnnnnnnnnnnnnnnnnnnnnnnnnnnnnnnnnnnnnnnnnnnnnnnnnnnnnnnnnnnnnnnnnnnnnnnnnnnnnnnnnnnnnnnnnnnnnnnnnnnnnnnnnnnnnnnnnnnnnnnnnnnnnnnnnnnnnnnnnnnnnnnnnnnnnnnnnnnnnnnnnnnnnnnnnnnnnnnnnnnnnnnnnnnnnnnnnnnnnnnnnnnnnnnnnnnnnnnnnnnnnnnnnnnnnnnnnnnnnnnnnnnnnnnnnnnnnnnnnnnnnnnnnnnnnnnnnnnnnnnnnnnnnnnnnnnnnnnnnnnnnnnnnnnnnnnnnnnnnnnnnnnnnnnnnnnnnnnnnnnnnnnnnnnnnnnnnnnnnnnnnnnnnnnnnnnnnnnnnnnnnnnnnnnnnnnnnnnnnnnnnnnnnnnnnnnnnnnnnnnnnnnnnnnnnnnnnnnnnnnnnnnnnnnnnnnnnnnnnnnnnnnnnnnnnnnnnnnnnnnnnnnnnnnnnnnnnnnnnnnnnnnnnnnnnnnnnnnnnnnnnnnnnnnnnnnnnnnnnnnnnnnnnnnnnnnnnnnnnnnnnnnnnnnnnnnnnnnnnnnnnnnnnnnnnnnnnnnnnnnnnnnnnnnnnnnnnnnnnnnnnnnnnnnnnnnnnnnnnnnnnnnnnnnnnnnnnnnnnnnnnnnnnnnnnnnnnnnnnnnnnnnnnnnnnnnnnnnnnnnnnnnnnnnnnnnnnnnnnnnnnnnnnnnnnnnnnnnnnnnnnnnnnnnnnnnnnnnnnnnnnnnnnnnnnnnnnnnnnnnnnnnnnnnnnnnnnnnnnnnnnnnnnnnnnnnnnnnnnnnnnnnnnnnnnnnnnnnnnnnnnnnnnnnnnnnnnnnnnnnnnnnnnnnnnnnnnnnnnnnnnnnnnnnnnnnnnnnnnnnnnnnnnnnnnnnnnnnnnnnnnnnnnnnnnnnnnnnnnnnnnnnnnnnnnnnnnnnnnnnnnnnnnnnnnnnnnnnnnnnnnnnnnnnnnnnnnnnnnnnnnnnnnnnnnnnnnnnnnnnnnnnnnnnnnnnnnnnnnnnnnnnnnnnnnnnnnnnnnnnnnnnnnnnnnnnnnnnnnnnnnnnnnnnnnnnnnnnnnnnnnnnnnnnnnnnnnnnnnnnnnnnnnnnnnnnnnnnnnnnnnnnnnnnnnnnnnnnnnnnnnnnnnnnnnnnnnnnnnnnnnnnnnnnnnnnnnnnnnnnnnnnnnnnnnnnnnnnnnnnnnnnnnnnnnnnnnnnnnnnnnnnnnnnnnnnnnnnnnnnnnnnnnnnnnnnnnnnnnnnnnnnnnnnnnnnnnnnnnnnnnnnnnnnnnnnnnnnnnnnnnnnnnnnnnnnnnnnnnnnnnnnnnnnnnnnnnnnnnnnnnnnnnnnnnnnnnnnnnnnnnnnnnnnnnnnnnnnnnnnnnnnnnnnnnnnnnnnnnnnnnnnnnnnnnnnnnnnnnnnnnnnnnnnnnnnnnnnnnnnnnnnnnnnnnnnnnnnnnnnnnnnnnnnnnnnnnnnnnnnnnnnnnnnnnnnnnnnnnnnnnnnnnnnnnnnnnnnnnnnnnnnnnnnnnnnnnnnnnnnnnnnnnnnnnnnnnnnnnnnnnnnnnnnnnnnnnnnnnnnnnnnnnnnnnnnnnnnnnnnnnnnnnnnnnnnnnnnnnnnnnnnnnnnnnnnnnnnnnnnnnnnnnnnnnnnnnnnnnnnnnnnnnnnnnnnnnnnnnnnnnnnnnnnnnnnnnnnnnnnnnnnnnnnnnnnnnnnnnnnnnnnnnnnnnnnnnnnnnnnnnnnnnnnnnnnnnnnnnnnnnnnnnnnnnnnnnnnnnnnnnnnnnnnnnnnnnnnnnnnnnnnnnnnnnnnnnnnnnnnnnnnnnnnnnnnnnnnnnnnnnnnnnnnnnnnnnnnnnnnnnnnnnnnnnnnnnnnnnnnnnnnnnnnnnnnnnnnnnnnnnnnnnnnnnnnnnnnnnnnnnnnnnnnnnnnnnnnnnnnnnnnnnnnnnnnnnnnnnnnnnnnnnnnnnnnnnnnnnnnnnnnnnnnnnnnnnnnnnnnnnnnnnnnnnnnnnnnnnnnnnnnnnnnnnnnnnnnnnnnnnnnnnnnnnnnnnnnnnnnnnnnnnnnnnnnnnnnnnnnnnnnnnnnnnnnnnnnnnnnnnnnnnnnnnnnnnnnnnnnnnnnnnnnnnnnnnnnnnnnnnnnnnnnnnnnnnnnnnnnnnnnnnnnnnnnnnnnnnnnnnnnnnnnnnnnnnnnnnnnnnnnnnnnnnnnnnnnnnnnnnnnnnnnnnnnnnnnnnnnnnnnnnnnnnnnnnnnnnnnnnnnnnnnnnnnnnnnnnnnnnnnnnnnnnnnnnnnnnnnnnnnnnnnnnnnnnnnnnnnnnnnnnnnnnnnnnnnnnnnnnnnnnnnnnnnnnnnnnnnnnnnnnnnnnnnnnnnnnnnnnnnnnnnnnnnnnnnnnnnnnnnnnnnnnnnnnnnnnnnnnnnnnnnnnnnnnnnnnnnnnnnnnnnnnnnnnnnnnnnnnnnnnnnnnnnnnnnnnnnnnnnnnnnnnnnnnnnnnnnnnnnnnnnnnnnnnnnnnnnnnnnnnnnnnnnnnnnnnnnnnnnnnnnnnnnnnnnnnnnnnnnnnnnnnnnnnnnnnnnnnnnnnnnnnnnnnnnnnnnnnnnnnnnnnnnnnnnnnnnnnnnnnnnnnnnnnnnnnnnnnnnnnnnnnnnnnnnnnnnnnnnnnnnnnnnnnnnnnnnnnnnnnnnnnnnnnnnnnnnnnnnnnnnnnnnnnnnnnnnnnnnnnnnnnnnnnnnnnnnnnnnnnnnnnnnnnnnnnnnnnnnnnnnnnnnnnnnnnnnnnnnnnnnnnnnnnnnnnnnnnnnnnnnnnnnnnnnnnnnnnnnnnnnnnnnnnnnnnnnnnnnnnnnnnnnnnnnnnnnnnnnnnnnnnnnnnnnnnnnnnnnnnnnnnnnnnnnnnnnnnnnnnnnnnnnnnnnnnnnnnnnnnnnnnnnnnnnnnnnnnnnnnnnnnnnnnnnnnnnnnnnnnnnnnnnnnnnnnnnnnnnnnnnnnnnnnnnnnnnnnnnnnnnnnnnnnnnnnnnnnnnnnnnnnnnnnnnnnnnnnnnnnnnnnnnnnnnnnnnnnnnnnnnnnnnnnnnnnnnnnnnnnnnnnnnnnnnnnnnnnnnnnnnnnnnnnnnnnnnnnnnnnnnnnnnnnnnnnnnnnnnnnnnnnnnnnnnnnnnnnnnnnnnnnnnnnnnnnnnnnnnnnnnnnnnnnnnnnnnnnnnnnnnnnnnnnnnnnnnnnnnnnnnnnnnnnnnnnnnnnnnnnnnnnnnnnnnnnnnnnnnnnnnnnnnnnnnnnnnnnnnnnnnnnnnnnnnnnnnnnnnnnnnnnnnnnnnnnnnnnnnnnnnnnnnnnnnnnnnnnnnnnnnnnnnnnnnnnnnnnnnnnnnnnnnnnnnnnnnnnnnnnnnnnnnnnnnnnnnnnnnnnnnnnnnnnnnnnnnnnnnnnnnnnnnnnnnnnnnnnnnnnnnnnnnnnnnnnnnnnnnnnnnnnnnnnnnnnnnnnnnnnnnnnnnnnnnnnnnnnnnnnnnnnnnnnnnnnnnnnnnnnnnnnnnnnnnnnnnnnnnnnnnnnnnnnnnnnnnnnnnnnnnnnnnnnnnnnnnnnnnnnnnnnnnnnnnnnnnnnnnnnnnnnnnnnnnnnnnnnnnnnnnnnnnnnnnnnnnnnnnnnnnnnnnnnnnnnnnnnnnnnnnnnnnnnnnnnnnnnnnnnnnnnnnnnnnnnnnnnnnnnnnnnnnnnnnnnnnnnnnnnnnnnnnnnnnnnnnnnnnnnnnnnnnnnnnnnnnnnnnnnnnnnnnnnnnnnnnnnnnnnnnnnnnnnnnnnnnnnnnnnnnnnnnnnnnnnnnnnnnnnnnnnnnnnnnnnnnnnnnnnnnnnnnnnnnnnnnnnnnnnnnnnnnnnnnnnnnnnnnnnnnnnnnnnnnnnnnnnnnnnnnnnnnnnnnnnnnnnnnnnnnnnnnnnnnnnnnnnnnnnnnnnnnnnnnnnnnnnnnnnnnnnnnnnnnnnnnnnnnnnnnnnnnnnnnnnnnnnnnnnnnnnnnnnnnnnnnnnnnnnnnnnnnnnnnnnnnnnnnnnnnnnnnnnnnnnnnnnnnnnnnnnnnnnnnnnnnnnnnnnnnnnnnnnnnnnnnnnnnnnnnnnnnnnnnnnnnnnnnnnnnnnnnnnnnnnnnnnnnnnnnnnnnnnnnnnnnnnnnnnnnnnnnnnnnnnnnnnnnnnnnnnnnnnnnnnnnnnnnnnnnnnnnnnnnnnnnnnnnnnnnnnnnnnnnnnnnnnnnnnnnnnnnnnnnnnnnnnnnnnnnnnnnnnnnnnnnnnnnnnnnnnnnnnnnnnnnnnnnnnnnnnnnnnnnnnnnnnnnnnnnnnnnnnnnnnnnnnnnnnnnnnnnnnnnnnnnnnnnnnnnnnnnnnnnnnnnnnnnnnnnnnnnnnnnnnnnnnnnnnnnnnnnnnnnnnnnnnnnnnnnnnnnnnnnnnnnnnnnnnnnnnnnnnnnnnnnnnnnnnnnnnnnnnnnnnnnnnnnnnnnnnnnnnnnnnnnnnnnnnnnnnnnnnnnnnnnnnnnnnnnnnnnnnnnnnnnnnnnnnnnnnnnnnnnnnnnnnnnnnnnnnnnnnnnnnnnnnnnnnnnnnnnnnnnnnnnnnnnnnnnnnnnnnnnnnnnnnnnnnnnnnnnnnnnnnnnnnnnnnnnnnnnnnnnnnnnnnnnnnnnnnnnnnnnnnnnnnnnnnnnnnnnnnnnnnnnnnnnnnnnnnnnnnnnnnnnnnnnnnnnnnnnnnnnnnnnnnnnnnnnnnnnnnnnnnnnnnnnnnnnnnnnnnnnnnnnnnnnnnnnnnnnnnnnnnnnnnnnnnnnnnnnnnnnnnnnnnnnnnnnnnnnnnnnnnnnnnnnnnnnnnnnnnnnnnnnnnnnnnnnnnnnnnnnnnnnnnnnnnnnnnnnnnnnnnnnnnnnnnnnnnnnnnnnnnnnnnnnnnnnnnnnnnnnnnnnnnnnnnnnnnnnnnnnnnnnnnnnnnnnnnnnnnnnnnnnnnnnnnnnnnnnnnnnnnnnnnnnnnnnnnnnnnnnnnnnnnnnnnnnnnnnnnnnnnnnnnnnnnnnnnnnnnnnnnnnnnnnnnnnnnnnnnnnnnnnnnnnnnnnnnnnnnnnnnnnnnnnnnnnnnnnnnnnnnnnnnnnnnnnnnnnnnnnnnnnnnnnnnnnnnnnnnnnnnnnnnnnnnnnnnnnnnnnnnnnnnnnnnnnnnnnnnnnnnnnnnnnnnnnnnnnnnnnnnnnnnnnnnnnnnnnnnnnnnnnnnnnnnnnnnnnnnnnnnnnnnnnnnnnnnnnnnnnnnnnnnnnnnnnnnnnnnnnnnnnnnnnnnnnnnnnnnnnnnnnnnnnnnnnnnnnnnnnnnnnnnnnnnnnnnnnnnnnnnnnnnnnnnnnnnnnnnnnnnnnnnnnnnnnnnnnnnnnnnnnnnnnnnnnnnnnnnnnnnnnnnnnnnnnnnnnnnnnnnnnnnnnnnnnnnnnnnnnnnnnnnnnnnnnnnnnnnnnnnnnnnnnnnnnnnnnnnnnnnnnnnnnnnnnnnnnnnnnnnnnnnnnnnnnnnnnnnnnnnnnnnnnnnnnnnnnnnnnnnnnnnnnnnnnnnnnnnnnnnnnnnnnnnnnnnnnnnnnnnnnnnnnnnnnnnnnnnnnnnnnnnnnnnnnnnnnnnnnnnnnnnnnnnnnnnnnnnnnnnnnnnnnnnnnnnnnnnnnnnnnnnnnnnnnnnnnnnnnnnnnnnnnnnnnnnnnnnnnnnnnnnnnnnnnnnnnnnnnnnnnnnnnnnnnnnnnnnnnnnnnnnnnnnnnnnnnnnnnnnnnnnnnnnnnnnnnnnnnnnnnnnnnnnnnnnnnnnnnnnnnnnnnnnnnnnnnnnnnnnnnnnnnnnnnnnnnnnnnnnnnnnnnnnnnnnnnnnnnnnnnnnnnnnnnnnnnnnnnnnnnnnnnnnnnnnnnnnnnnnnnnnnnnnnnnnnnnnnnnnnnnnnnnnnnnnnnnnnnnnnnnnnnnnnnnnnnnnnnnnnnnnnnnnnnnnnnnnnnnnnnnnnnnnnnnnnnnnnnnnnnnnnnnnnnnnnnnnnnnnnnnnnnnnnnnnnnnnnnnnnnnnnnnnnnnnnnnnnnnnnnnnnnnnnnnnnnnnnnnnnnnnnnnnnnnnnnnnnnnnnnnnnnnnnnnnnnnnnnnnnnnnnnnnnnnnnnnnnnnnnnnnnnnnnnnnnnnnnnnnnnnnnnnnnnnnnnnnnnnnnnnnnnnnnnnnnnnnnnnnnnnnnnnnnnnnnnnnnnnnnnnnnnnnnnnnnnnnnnnnnnnnnnnnnnnnnnnnnnnnnnnnnnnnnnnnnnnnnnnnnnnnnnnnnnnnnnnnnnnnnnnnnnnnnnnnnnnnnnnnnnnnnnnnnnnnnnnnnnnnnnnnnnnnnnnnnnnnnnnnnnnnnnnnnnnnnnnnnnnnnnnnnnnnnnnnnnnnnnnnnnnnnnnnnnnnnnnnnnnnnnnnnnnnnnnnnnnnnnnnnnnnnnnnnnnnnnnnnnnnnnnnnnnnnnnnnnnnnnnnnnnnnnnnnnnnnnnnnnnnnnnnnnnnnnnnnnnnnnnnnnnnnnnnnnnnnnnnnnnnnnnnnnnnnnnnnnnnnnnnnnnnnnnnnnnnnnnnnnnnnnnnnnnnnnnnnnnnnnnnnnnnnnnnnnnnnnnnnnnnnnnnnnnnnnnnnnnnnnnnnnnnnnnnnnnnnnnnnnnnnnnnnnnnnnnnnnnnnnnnnnnnnnnnnnnnnnnnnnnnnnnnnnnnnnnnnnnnnnnnnnnnnnnnnnnnnnnnnnnnnnnnnnnnnnnnnnnnnnnnnnnnnnnnnnnnnnnnnnnnnnnnnnnnnnnnnnnnnnnnnnnnnnnnnnnnnnnnnnnnnnnnnnnnnnnnnnnnnnnnnnnnnnnnnnnnnnnnnnnnnnnnnnnnnnnnnnnnnnnnnnnnnnnnnnnnnnnnnnnnnnnnnnnnnnnnnnnnnnnnnnnnnnnnnnnnnnnnnnnnnnnnnnnnnnnnnnnnnnnnnnnnnnnnnnnnnnnnnnnnnnnnnnnnnnnnnnnnnnnnnnnnnnnnnnnnnnnnnnnnnnnnnnnnnnnnnnnnnnnnnnnnnnnnnnnnnnnnnnnnnnnnnnnnnnnnnnnnnnnnnnnnnnnnnnnnnnnnnnnnnnnnnnnnnnnnnnnnnnnnnnnnnnnnnnnnnnnnnnnnnnnnnnnnnnnnnnnnnnnnnnnnnnnnnnnnnnnnnnnnnnnnnnnnnnnnnnnnnnnnnnnnnnnnnnnnnnnnnnnnnnnnnnnnnnnnnnnnnnnnnnnnnnnnnnnnnnnnnnnnnnnnnnnnnnnnnnnnnnnnnnnnnnnnnnnnnnnnnnnnnnnnnnnnnnnnnnnnnnnnnnnnnnnnnnnnnnnnnnnnnnnnnnnnnnnnnnnnnnnnnnnnnnnnnnnnnnnnnnnnnnnnnnnnnnnnnnnnnnnnnnnnnnnnnnnnnnnnnnnnnnnnnnnnnnnnnnnnnnnnnnnnnnnnnnnnnnnnnnnnnnnnnnnnnnnnnnnnnnnnnnnnnnnnnnnnnnnnnnnnnnnnnnnnnnnnnnnnnnnnnnnnnnnnnnnnnnnnnnnnnnnnnnnnnnnnnnnnnnnnnnnnnnnnnnnnnnnnnnnnnnnnnnnnnnnnnnnnnnnnnnnnnnnnnnnnnnnnnnnnnnnnnnnnnnnnnnnnnnnnnnnnnnnnnnnnnnnnnnnnnnnnnnnnnnnnnnnnnnnnnnnnnnnnnnnnnnnnnnnnnnnnnnnnnnnnnnnnnnnnnnnnnnnnnnnnnnnnnnnnnnnnnnnnnnnnnnnnnnnnnnnnnnnnnnnnnnnnnnnnnnnnnnnnnnnnnnnnnnnnnnnnnnnnnnnnnnnnnnnnnnnnnnnnnnnnnnnnnnnnnnnnnnnnnnnnnnnnnnnnnnnnnnnnnnnnnnnnnnnnnnnnnnnnnnnnnnnnnnnnnnnnnnnnnnnnnnnnnnnnnnnnnnnnnnnnnnnnnnnnnnnnnnnnnnnnnnnnnnnnnnnnnnnnnnnnnnnnnnnnnnnnnnnnnnnnnnnnnnnnnnnnnnnnnnnnnnnnnnnnnnnnnnnnnnnnnnnnnnnnnnnnnnnnnnnnnnnnnnnnnnnnnnnnnnnnnnnnnnnnnnnnnnnnnnnnnnnnnnnnnnnnnnnnnnnnnnnnnnnnnnnnnnnnnnnnnnnnnnnnnnnnnnnnnnnnnnnnnnnnnnnnnnnnnnnnnnnnnnnnnnnnnnnnnnnnnnnnnnnnnnnnnnnnnnnnnnnnnnnnnnnnnnnnnnnnnnnnnnnnnnnnnnnnnnnnnnnnnnnnnnnnnnnnnnnnnnnnnnnnnnnnnnnnnnnnnnnnnnnnnnnnnnnnnnnnnnnnnnnnnnnnnnnnnnnnnnnnnnnnnnnnnnnnnnnnnnnnnnnnnnnnnnnnnnnnnnnnnnnnnnnnnnnnnnnnnnnnnnnnnnnnnnnnnnnnnnnnnnnnnnnnnnnnnnnnnnnnnnnnnnnnnnnnnnnnnnnnnnnnnnnnnnnnnnnnnnnnnnnnnnnnnnnnnnnnnnnnnnnnnnnnnnnnnnnnnnnnnnnnnnnnnnnnnnnnnnnnnnnnnnnnnnnnnnnnnnnnnnnnnnnnnnnnnnnnnnnnnnnnnnnnnnnnnnnnnnnnnnnnnnnnnnnnnnnnnnnnnnnnnnnnnnnnnnnnnnnnnnnnnnnnnnnnnnnnnnnnnnnnnnnnnnnnnnnnnnnnnnnnnnnnnnnnnnnnnnnnnnnnnnnnnnnnnnnnnnnnnnnnnnnnnnnnnnnnnnnnnnnnnnnnnnnnnnnnnnnnnnnnnnnnnnnnnnnnnnnnnnnnnnnnnnnnnnnnnnnnnnnnnnnnnnnnnnnnnnnnnnnnnnnnnnnnnnnnnnnnnnnnnnnnnnnnnnnnnnnnnnnnnnnnnnnnnnnnnnnnnnnnnnnnnnnnnnnnnnnnnnnnnnnnnnnnnnnnnnnnnnnnnnnnnnnnnnnnnnnnnnnnnnnnnnnnnnnnnnnnnnnnnnnnnnnnnnnnnnnnnnnnnnnnnnnnnnnnnnnnnnnnnnnnnnnnnnnnnnnnnnnnnnnnnnnnnnnnnnnnnnnnnnnnnnnnnnnnnnnnnnnnnnnnnnnnnnnnnnnnnnnnnnnnnnnnnnnnnnnnnnnnnnnnnnnnnnnnnnnnnnnnnnnnnnnnnnnnnnnnnnnnnnnnnnnnnnnnnnnnnnnnnnnnnnnnnnnnnnnnnnnnnnnnnnnnnnnnnnnnnnnnnnnnnnnnnnnnnnnnnnnnnnnnnnnnnnnnnnnnnnnnnnnnnnnnnnnnnnnnnnnnnnnnnnnnnnnnnnnnnnnnnnnnnnnnnnnnnnnnnnnnnnnnnnnnnnnnnnnnnnnnnnnnnnnnnnnnnnnnnnnnnnnnnnnnnnnnnnnnnnnnnnnnnnnnnnnnnnnnnnnnnnnnnnnnnnnnnnnnnnnnnnnnnnnnnnnnnnnnnnnnnnnnnnnnnnnnnnnnnnnnnnnnnnnnnnnnnnnnnnnnnnnnnnnnnnnnnnnnnnnnnnnnnnnnnnnnnnnnnnnnnnnnnnnnnnnnnnnnnnnnnnnnnnnnnnnnnnnnnnnnnnnnnnnnnnnnnnnnnnnnnnnnnnnnnnnnnnnnnnnnnnnnnnnnnnnnnnnnnnnnnnnnnnnnnnnnnnnnnnnnnnnnnnnnnnnnnnnnnnnnnnnnnnnnnnnnnnnnnnnnnnnnnnnnnnnnnnnnnnnnnnnnnnnnnnnnnnnnnnnnnnnnnnnnnnnnnnnnnnnnnnnnnnnnnnnnnnnnnnnnnnnnnnnnnnnnnnnnnnnnnnnnnnnnnnnnnnnnnnnnnnnnnnnnnnnnnnnnnnnnnnnnnnnnnnnnnnnnnnnnnnnnnnnnnnnnnnnnnnnnnnnnnnnnnnnnnnnnnnnnnnnnnnnnnnnnnnnnnnnnnnnnnnnnnnnnnnnnnnnnnnnnnnnnnnnnnnnnnnnnnnnnnnnnnnnnnnnnnnnnnnnnnnnnnnnnnnnnnnnnnnnnnnnnnnnnnnnnnnnnnnnnnnnnnnnnnnnnnnnnnnnnnnnnnnnnnnnnnnnnnnnnnnnnnnnnnnnnnnnnnnnnnnnnnnnnnnnnnnnnnnnnnnnnnnnnnnnnnnnnnnnnnnnnnnnnnnnnnnnnnnnnnnnnnnnnnnnnnnnnnnnnnnnnnnnnnnnnnnnnnnnnnnnnnnnnnnnnnnnnnnnnnnnnnnnnnnnnnnnnnnnnnnnnnnnnnnnnnnnnnnnnnnnnnnnnnnnnnnnnnnnnnnnnnnnnnnnnnnnnnnnnnnnnnnnnnnnnnnnnnnnnnnnnnnnnnnnnnnnnnnnnnnnnnnnnnnnnnnnnnnnnnnnnnnnnnnnnnnnnnnnnnnnnnnnnnnnnnnnnnnnnnnnnnnnnnnnnnnnnnnnnnnnnnnnnnnnnnnnnnnnnnnnnnnnnnnnnnnnnnnnnnnnnnnnnnnnnnnnnnnnnnnnnnnnnnnnnnnnnnnnnnnnnnnnnnnnnnnnnnnnnnnnnnnnnnnnnnnnnnnnnnnnnnnnnnnnnnnnnnnnnnnnnnnnnnnnnnnnnnnnnnnnnnnnnnnnnnnnnnnnnnnnnnnnnnnnnnnnnnnnnnnnnnnnnnnnnnnnnnnnnnnnnnnnnnnnnnnnnnnnnnnnnnnnnnnnnnnnnnnnnnnnnnnnnnnnnnnnnnnnnnnnnnnnnnnnnnnnnnnnnnnnnnnnnnnnnnnnnnnnnnnnnnnnnnnnnnnnnnnnnnnnnnnnnnnnnnnnnnnnnnnnnnnnnnnnnnnnnnnnnnnnnnnnnnnnnnnnnnnnnnnnnnnnnnnnnnnnnnnnnnnnnnnnnnnnnnnnnnnnnnnnnnnnnnnnnnnnnnnnnnnnnnnnnnnnnnnnnnnnnnnnnnnnnnnnnnnnnnnnnnnnnnnnnnnnnnnnnnnnnnnnnnnnnnnnnnnnnnnnnnnnnnnnnnnnnnnnnnnnnnnnnnnnnnnnnnnnnnnnnnnnnnnnnnnnnnnnnnnnnnnnnnnnnnnnnnnnnnnnnnnnnnnnnnnnnnnnnnnnnnnnnnnnnnnnnnnnnnnnnnnnnnnnnnnnnnnnnnnnnnnnnnnnnnnnnnnnnnnnnnnnnnnnnnnnnnnnnnnnnnnnnnnnnnnnnnnnnnnnnnnnnnnnnnnnnnnnnnnnnnnnnnnnnnnnnnnnnnnnnnnnnnnnnnnnnnnnnnnnnnnnnnnnnnnnnnnnnnnnnnnnnnnnnnnnnnnnnnnnnnnnnnnnnnnnnnnnnnnnnnnnnnnnnnnnnnnnnnnnnnnnnnnnnnnnnnnnnnnnnnnnnnnnnnnnnnnnnnnnnnnnnnnnnnnnnnnnnnnnnnnnnnnnnnnnnnnnnnnnnnnnnnnnnnnnnnnnnnnnnnnnnnnnnnnnnnnnnnnnnnnnnnnnnnnnnnnnnnnnnnnnnnnnnnnnnnnnnnnnnnnnnnnnnnnnnnnnnnnnnnnnnnnnnnnnnnnnnnnnnnnnnnnnnnnnnnnnnnnnnnnnnnnnnnnnnnnnnnnnnnnnnnnnnnnnnnnnnnnnnnnnnnnnnnnnnnnnnnnnnnnnnnnnnnnnnnnnnnnnnnnnnnnnnnnnnnnnnnnnnnnnnnnnnnnnnnnnnnnnnnnnnnnnnnnnnnnnnnnnnnnnnnnnnnnnnnnnnnnnnnnnnnnnnnnnnnnnnnnnnnnnnnnnnnnnnnnnnnnnnnnnnnnnnnnnnnnnnnnnnnnnnnnnnnnnnnnnnnnnnnnnnnnnnnnnnnnnnnnnnnnnnnnnnnnnnnnnnnnnnnnnnnnnnnnnnnnnnnnnnnnnnnnnnnnnnnnnnnnnnnnnnnnnnnnnnnnnnnnnnnnnnnnnnnnnnnnnnnnnnnnnnnnnnnnnnnnnnnnnnnnnnnnnnnnnnnnnnnnnnnnnnnnnnnnnnnnnnnnnnnnnnnnnnnnnnnnnnnnnnnnnnnnnnnnnnnnnnnnnnnnnnnnnnnnnnnnnnnnnnnnnnnnnnnnnnnnnnnnnnnnnnnnnnnnnnnnnnnnnnnnnnnnnnnnnnnnnnnnnnnnnnnnnnnnnnnnnnnnnnnnnnnnnnnnnnnnnnnnnnnnnnnnnnnnnnnnnnnnnnnnnnnnnnnnnnnnnnnnnnnnnnnnnnnnnnnnnnnnnnnnnnnnnnnnnnnnnnnnnnnnnnnnnnnnnnnnnnnnnnnnnnnnnnnnnnnnnnnnnnnnnnnnnnnnnnnnnnnnnnnnnnnnnnnnnnnnnnnnnnnnnnnnnnnnnnnnnnnnnnnnnnnnnnnnnnnnnnnnnnnnnnnnnnnnnnnnnnnnnnnnnnnnnnnnnnnnnnnnnnnnnnnnnnnnnnnnnnnnnnnnnnnnnnnnnnnnnnnnnnnnnnnnnnnnnnnnnnnnnnnnnnnnnnnnnnnnnnnnnnnnnnnnnnnnnnnnnnnnnnnnnnnnnnnnnnnnnnnnnnnnnnnnnnnnnnnnnnnnnnnnnnnnnnnnnnnnnnnnnnnnnnnnnnnnnnnnnnnnnnnnnnnnnnnnnnnnnnnnnnnnnnnnnnnnnnnnnnnnnnnnnnnnnnnnnnnnnnnnnnnnnnnnnnnnnnnnnnnnnnnnnnnnnnnnnnnnnnnnnnnnnnnnnnnnnnnnnnnnnnnnnnnnnnnnnnnnnnnnnnnnnnnnnnnnnnnnnnnnnnnnnnnnnnnnnnnnnnnnnnnnnnnnnnnnnnnnnnnnnnnnnnnnnnnnnnnnnnnnnnnnnnnnnnnnnnnnnnnnnnnnnnnnnnnnnnnnnnnnnnnnnnnnnnnnnnnnnnnnnnnnnnnnnnnnnnnnnnnnnnnnnnnnnnnnnnnnnnnnnnnnnnnnnnnnnnnnnnnnnnnnnnnnnnnnnnnnnnnnnnnnnnnnnnnnnnnnnnnnnnnnnnnnnnnnnnnnnnnnnnnnnnnnnnnnnnnnnnnnnnnnnnnnnnnnnnnnnnnnnnnnnnnnnnnnnnnnnnnnnnnnnnnnnnnnnnnnnnnnnnnnnnnnnnnnnnnnnnnnnnnnnnnnnnnnnnnnnnnnnnnnnnnnnnnnnnnnnnnnnnnnnnnnnnnnnnnnnnnnnnnnnnnnnnnnnnnnnnnnnnnnnnnnnnnnnnnnnnnnnnnnnnnnnnnnnnnnnnnnnnnnnnnnnnnnnnnnnnnnnnnnnnnnnnnnnnnnnnnnnnnnnnnnnnnnnnnnnnnnnnnnnnnnnnnnnnnnnnnnnnnnnnnnnnnnnnnnnnnnnnnnnnnnnnnnnnnnnnnnnnnnnnnnnnnnnnnnnnnnnnnnnnnnnnnnnnnnnnnnnnnnnnnnnnnnnnnnnnnnnnnnnnnnnnnnnnnnnnnnnnnnnnnnnnnnnnnnnnnnnnnnnnnnnnnnnnnnnnnnnnnnnnnnnnnnnnnnnnnnnnnnnnnnnnnnnnnnnnnnnnnnnnnnnnnnnnnnnnnnnnnnnnnnnnnnnnnnnnnnnnnnnnnnnnnnnnnnnnnnnnnnnnnnnnnnnnnnnnnnnnnnnnnnnnnnnnnnnnnnnnnnnnnnnnnnnnnnnnnnnnnnnnnnnnnnnnnnnnnnnnnnnnnnnnnnnnnnnnnnnnnnnnnnnnnnnnnnnnnnnnnnnnnnnnnnnnnnnnnnnnnnnnnnnnnnnnnnnnnnnnnnnnnnnnnnnnnnnnnnnnnnnnnnnnnnnnnnnnnnnnnnnnnnnnnnnnnnnnnnnnnnnnnnnnnnnnnnnnnnnnnnnnnnnnnnnnnnnnnnnnnnnnnnnnnnnnnnnnnnnnnnnnnnnnnnnnnnnnnnnnnnnnnnnnnnnnnnnnnnnnnnnnnnnnnnnnnnnnnnnnnnnnnnnnnnnnnnnnnnnnnnnnnnnnnnnnnnnnnnnnnnnnnnnnnnnnnnnnnnnnnnnnnnnnnnnnnnnnnnnnnnnnnnnnnnnnnnnnnnnnnnnnnnnnnnnnnnnnnnnnnnnnnnnnnnnnnnnnnnnnnnnnnnnnnnnnnnnnnnnnnnnnnnnnnnnnnnnnnnnnnnnnnnnnnnnnnnnnnnnnnnnnnnnnnnnnnnnnnnnnnnnnnnnnnnnnnnnnnnnnnnnnnnnnnnnnnnnnnnnnnnnnnnnnnnnnnnnnnnnnnnnnnnnnnnnnnnnnnnnnnnnnnnnnnnnnnnnnnnnnnnnnnnnnnnnnnnnnnnnnnnnnnnnnnnnnnnnnnnnnnnnnnnnnnnnnnnnnnnnnnnnnnnnnnnnnnnnnnnnnnnnnnnnnnnnnnnnnnnnnnnnnnnnnnnnnnnnnnnnnnnnnnnnnnnnnnnnnnnnnnnnnnnnnnnnnnnnnnnnnnnnnnnnnnnnnnnnnnnnnnnnnnnnnnnnnnnnnnnnnnnnnnnnnnnnnnnnnnnnnnnnnnnnnnnnnnnnnnnnnnnnnnnnnnnnnnnnnnnnnnnnnnnnnnnnnnnnnnnnnnnnnnnnnnnnnnnnnnnnnnnnnnnnnnnnnnnnnnnnnnnnnnnnnnnnnnnnnnnnnnnnnnnnnnnnnnnnnnnnnnnnnnnnnnnnnnnnnnnnnnnnnnnnnnnnnnnnnnnnnnnnnnnnnnnnnnnnnnnnnnnnnnnnnnnnnnnnnnnnnnnnnnnnnnnnnnnnnnnnnnnnnnnnnnnnnnnnnnnnnnnnnnnnnnnnnnnnnnnnnnnnnnnnnnnnnnnnnnnnnnnnnnnnnnnnnnnnnnnnnnnnnnnnnnnnnnnnnnnnnnnnnnnnnnnnnnnnnnnnnnnnnnnnnnnnnnnnnnnnnnnnnnnnnnnnnnnnnnnnnnnnnnnnnnnnnnnnnnnnnnnnnnnnnnnnnnnnnnnnnnnnnnnnnnnnnnnnnnnnnnnnnnnnnnnnnnnnnnnnnnnnnnnnnnnnnnnnnnnnnnnnnnnnnnnnnnnnnnnnnnnnnnnnnnnnnnnnnnnnnnnnnnnnnnnnnnnnnnnnnnnnnnnnnnnnnnnnnnnnnnnnnnnnnnnnnnnnnnnnnnnnnnnnnnnnnnnnnnnnnnnnnnnnnnnnnnnnnnnnnnnnnnnnnnnnnnnnnnnnnnnnnnnnnnnnnnnnnnnnnnnnnnnnnnnnnnnnnnnnnnnnnnnnnnnnnnnnnnnnnnnnnnnnnnnnnnnnnnnnnnnnnnnnnnnnnnnnnnnnnnnnnnnnnnnnnnnnnnnnnnnnnnnnnnnnnnnnnnnnnnnnnnnnnnnnnnnnnnnnnnnnnnnnnnnnnnnnnnnnnnnnnnnnnnnnnnnnnnnnnnnnnnnnnnnnnnnnnnnnnnnnnnnnnnnnnnnnnnnnnnnnnnnnnnnnnnnnnnnnnnnnnnnnnnnnnnnnnnnnnnnnnnnnnnnnnnnnnnnnnnnnnnnnnnnnnnnnnnnnnnnnnnnnnnnnnnnnnnnnnnnnnnnnnnnnnnnnnnnnnnnnnnnnnnnnnnnnnnnnnnnnnnnnnnnnnnnnnnnnnnnnnnnnnnnnnnnnnnnnnnnnnnnnnnnnnnnnnnnnnnnnnnnnnnnnnnnnnnnnnnnnnnnnnnnnnnnnnnnnnnnnnnnnnnnnnnnnnnnnnnnnnnnnnnnnnnnnnnnnnnnnnnnnnnnnnnnnnnnnnnnnnnnnnnnnnnnnnnnnnnnnnnnnnnnnnnnnnnnnnnnnnnnnnnnnnnnnnnnnnnnnnnnnnnnnnnnnnnnnnnnnnnnnnnnnnnnnnnnnnnnnnnnnnnnnnnnnnnnnnnnnnnnnnnnnnnnnnnnnnnnnnnnnnnnnnnnnnnnnnnnnnnnnnnnnnnnnnnnnnnnnnnnnnnnnnnnnnnnnnnnnnnnnnnnnnnnnnnnnnnnnnnnnnnnnnnnnnnnnnnnnnnnnnnnnnnnnnnnnnnnnnnnnnnnnnnnnnnnnnnnnnnnnnnnnnnnnnnnnnnnnnnnnnnnnnnnnnnnnnnnnnnnnnnnnnnnnnnnnnnnnnnnnnnnnnnnnnnnnnnnnnnnnnnnnnnnnnnnnnnnnnnnnnnnnnnnnnnnnnnnnnnnnnnnnnnnnnnnnnnnnnnnnnnnnnnnnnnnnnnnnnnnnnnnnnnnnnnnnnnnnnnnnnnnnnnnnnnnnnnnnnnnnnnnnnnnnnnnnnnnnnnnnnnnnnnnnnnnnnnnnnnnnnnnnnnnnnnnnnnnnnnnnnnnnnnnnnnnnnnnnnnnnnnnnnnnnnnnnnnnnnnnnnnnnnnnnnnnnnnnnnnnnnnnnnnnnnnnnnnnnnnnnnnnnnnnnnnnnnnnnnnnnnnnnnnnnnnnnnnnnnnnnnnnnnnnnnnnnnnnnnnnnnnnnnnnnnnnnnnnnnnnnnnnnnnnnnnnnnnnnnnnnnnnnnnnnnnnnnnnnnnnnnnnnnnnnnnnnnnnnnnnnnnnnnnnnnnnnnnnnnnnnnnnnnnnnnnnnnnnnnnnnnnnnnnnnnnnnnnnnnnnnnnnnnnnnnnnnnnnnnnnnnnnnnnnnnnnnnnnnnnnnnnnnnnnnnnnnnnnnnnnnnnnnnnnnnnnnnnnnnnnnnnnnnnnnnnnnnnnnnnnnnnnnnnnnnnnnnnnnnnnnnnnnnnnnnnnnnnnnnnnnnnnnnnnnnnnnnnnnnnnnnnnnnnnnnnnnnnnnnnnnnnnnnnnnnnnnnnnnnnnnnnnnnnnnnnnnnnnnnnnnnnnnnnnnnnnnnnnnnnnnnnnnnnnnnnnnnnnnnnnnnnnnnnnnnnnnnnnnnnnnnnnnnnnnnnnnnnnnnnnnnnnnnnnnnnnnnnnnnnnnnnnnnnnnnnnnnnnnnnnnnnnnnnnnnnnnnnnnnnnnnnnnnnnnnnnnnnnnnnnnnnnnnnnnnnnnnnnnnnnnnnnnnnnnnnnnnnnnnnnnnnnnnnnnnnnnnnnnnnnnnnnnnnnnnnnnnnnnnnnnnnnnnnnnnnnnnnnnnnnnnnnnnnnnnnnnnnnnnnnnnnnnnnnnnnnnnnnnnnnnnnnnnnnnnnnnnnnnnnnnnnnnnnnnnnnnnnnnnnnnnnnnnnnnnnnnnnnnnnnnnnnnnnnnnnnnnnnnnnnnnnnnnnnnnnnnnnnnnnnnnnnnnnnnnnnnnnnnnnnnnnnnnnnnnnnnnnnnnnnnnnnnnnnnnnnnnnnnnnnnnnnnnnnnnnnnnnnnnnnnnnnnnnnnnnnnnnnnnnnnnnnnnnnnnnnnnnnnnnnnnnnnnnnnnnnnnnnnnnnnnnnnnnnnnnnnnnnnnnnnnnnnnnnnnnnnnnnnnnnnnnnnnnnnnnnnnnnnnnnnnnnnnnnnnnnnnnnnnnnnnnnnnnnnnnnnnnnnnnnnnnnnnnnnnnnnnnnnnnnnnnnnnnnnnnnnnnnnnnnnnnnnnnnnnnnnnnnnnnnnnnnnnnnnnnnnnnnnnnnnnnnnnnnnnnnnnnnnnnnnnnnnnnnnnnnnnnnnnnnnnnnnnnnnnnnnnnnnnnnnnnnnnnnnnnnnnnnnnnnnnnnnnnnnnnnnnnnnnnnnnnnnnnnnnnnnnnnnnnnnnnnnnnnnnnnnnnnnnnnnnnnnnnnnnnnnnnnnnnnnnnnnnnnnnnnnnnnnnnnnnnnnnnnnnnnnnnnnnnnnnnnnnnnnnnnnnnnnnnnnnnnnnnnnnnnnnnnnnnnnnnnnnnnnnnnnnnnnnnnnnnnnnnnnnnnnnnnnnnnnnnnnnnnnnnnnnnnnnnnnnnnnnnnnnnnnnnnnnnnnnnnnnnnnnnnnnnnnnnnnnnnnnnnnnnnnnnnnnnnnnnnnnnnnnnnnnnnnnnnnnnnnnnnnnnnnnnnnnnnnnnnnnnnnnnnnnnnnnnnnnnnnnnnnnnnnnnnnnnnnnnnnnnnnnnnnnnnnnnnnnnnnnnnnnnnnnnnnnnnnnnnnnnnnnnnnnnnnnnnnnnnnnnnnnnnnnnnnnnnnnnnnnnnnnnnnnnnnnnnnnnnnnnnnnnnnnnnnnnnnnnnnnnnnnnnnnnnnnnnnnnnnnnnnnnnnnnnnnnnnnnnnnnnnnnnnnnnnnnnnnnnnnnnnnnnnnnnnnnnnnnnnnnnnnnnnnnnnnnnnnnnnnnnnnnnnnnnnnnnnnnnnnnnnnnnnnnnnnnnnnnnnnnnnnnnnnnnnnnnnnnnnnnnnnnnnnnnnnnnnnnnnnnnnnnnnnnnnnnnnnnnnnnnnnnnnnnnnnnnnnnnnnnnnnnnnnnnnnnnnnnnnnnnnnnnnnnnnnnnnnnnnnnnnnnnnnnnnnnnnnnnnnnnnnnnnnnnnnnnnnnnnnnnnnnnnnnnnnnnnnnnnnnnnnnnnnnnnnnnnnnnnnnnnnnnnnnnnnnnnnnnnnnnnnnnnnnnnnnnnnnnnnnnnnnnnnnnnnnnnnnnnnnnnnnnnnnnnnnnnnnnnnnnnnnnnnnnnnnnnnnnnnnnnnnnnnnnnnnnnnnnnnnnnnnnnnnnnnnnnnnnnnnnnnnnnnnnnnnnnnnnnnnnnnnnnnnnnnnnnnnnnnnnnnnnnnnnnnnnnnnnnnnnnnnnnnnnnnnnnnnnnnnnnnnnnnnnnnnnnnnnnnnnnnnnnnnnnnnnnnnnnnnnnnnnnnnnnnnnnnnnnnnnnnnnnnnnnnnnnnnnnnnnnnnnnnnnnnnnnnnnnnnnnnnnnnnnnnnnnnnnnnnnnnnnnnnnnnnnnnnnnnnnnnnnnnnnnnnnnnnnnnnnnnnnnnnnnnnnnnnnnnnnnnnnnnnnnnnnnnnnnnnnnnnnnnnnnnnnnnnnnnnnnnnnnnnnnnnnnnnnnnnnnnnnnnnnnnnnnnnnnnnnnnnnnnnnnnnnnnnnnnnnnnnnnnnnnnnnnnnnnnnnnnnnnnnnnnnnnnnnnnnnnnnnnnnnnnnnnnnnnnnnnnnnnnnnnnnnnnnnnnnnnnnnnnnnnnnnnnnnnnnnnnnnnnnnnnnnnnnnnnnnnnnnnnnnnnnnnnnnnnnnnnnnnnnnnnnnnnnnnnnnnnnnnnnnnnnnnnnnnnnnnnnnnnnnnnnnnnnnnnnnnnnnnnnnnnnnnnnnnnnnnnnnnnnnnnnnnnnnnnnnnnnnnnnnnnnnnnnnnnnnnnnnnnnnnnnnnnnnnnnnnnnnnnnnnnnnnnnnnnnnnnnnnnnnnnnnnnnnnnnnnnnnnnnnnnnnnnnnnnnnnnnnnnnnnnnnnnnnnnnnnnnnnnnnnnnnnnnnnnnnnnnnnnnnnnnnnnnnnnnnnnnnnnnnnnnnnnnnnnnnnnnnnnnnnnnnnnnnnnnnnnnnnnnnnnnnnnnnnnnnnnnnnnnnnnnnnnnnnnnnnnnnnnnnnnnnnnnnnnnnnnnnnnnnnnnnnnnnnnnnnnnnnnnnnnnnnnnnnnnnnnnnnnnnnnnnnnnnnnnnnnnnnnnnnnnnnnnnnnnnnnnnnnnnnnnnnnnnnnnnnnnnnnnnnnnnnnnnnnnnnnnnnnnnnnnnnnnnnnnnnnnnnnnnnnnnnnnnnnnnnnnnnnnnnnnnnnnnnnnnnnnnnnnnnnnnnnnnnnnnnnnnnnnnnnnnnnnnnnnnnnnnnnnnnnnnnnnnnnnnnnnnnnnnnnnnnnnnnnnnnnnnnnnnnnnnnnnnnnnnnnnnnnnnnnnnnnnnnnnnnnnnnnnnnnnnnnnnnnnnnnnnnnnnnnnnnnnnnnnnnnnnnnnnnnnnnnnnnnnnnnnnnnnnnnnnnnnnnnnnnnnnnnnnnnnnnnnnnnnnnnnnnnnnnnnnnnnnnnnnnnnnnnnnnnnnnnnnnnnnnnnnnnnnnnnnnnnnnnnnnnnnnnnnnnnnnnnnnnnnnnnnnnnnnnnnnnnnnnnnnnnnnnnnnnnnnnnnnnnnnnnnnnnnnnnnnnnnnnnnnnnnnnnnnnnnnnnnnnnnnnnnnnnnnnnnnnnnnnnnnnnnnnnnnnnnnnnnnnnnnnnnnnnnnnnnnnnnnnnnnnnnnnnnnnnnnnnnnnnnnnnnnnnnnnnnnnnnnnnnnnnnnnnnnnnnnnnnnnnnnnnnnnnnnnnnnnnnnnnnnnnnnnnnnnnnnnnnnnnnnnnnnnnnnnnnnnnnnnnnnnnnnnnnnnnnnnnnnnnnnnnnnnnnnnnnnnnnnnnnnnnnnnnnnnnnnnnnnnnnnnnnnnnnnnnnnnnnnnnnnnnnnnnnnnnnnnnnnnnnnnnnnnnnnnnnnnnnnnnnnnnnnnnnnnnnnnnnnnnnnnnnnnnnnnnnnnnnnnnnnnnnnnnnnnnnnnnnnnnnnnnnnnnnnnnnnnnnnnnnnnnnnnnnnnnnnnnnnnnnnnnnnnnnnnnnnnnnnnnnnnnnnnnnnnnnnnnnnnnnnnnnnnnnnnnnnnnnnnnnnnnnnnnnnnnnnnnnnnnnnnnnnnnnnnnnnnnnnnnnnnnnnnnnnnnnnnnnnnnnnnnnnnnnnnnnnnnnnnnnnnnnnnnnnnnnnnnnnnnnnnnnnnnnnnnnnnnnnnnnnnnnnnnnnnnnnnnnnnnnnnnnnnnnnnnnnnnnnnnnnnnnnnnnnnnnnnnnnnnnnnnnnnnnnnnnnnnnnnnnnnnnnnnnnnnnnnnnnnnnnnnnnnnnnnnnnnnnnnnnnnnnnnnnnnnnnnnnnnnnnnnnnnnnnnnnnnnnnnnnnnnnnnnnnnnnnnnnnnnnnnnnnnnnnnnnnnnnnnnnnnnnnnnnnnnnnnnnnnnnnnnnnnnnnnnnnnnnnnnnnnnnnnnnnnnnnnnnnnnnnnnnnnnnnnnnnnnnnnnnnnnnnnnnnnnnnnnnnnnnnnnnnnnnnnnnnnnnnnnnnnnnnnnnnnnnnnnnnnnnnnnnnnnnnnnnnnnnnnnnnnnnnnnnnnnnnnnnnnnnnnnnnnnnnnnnnnnnnnnnnnnnnnnnnnnnnnnnnnnnnnnnnnnnnnnnnnnnnnnnnnnnnnnnnnnnnnnnnnnnnnnnnnnnnnnnnnnnnnnnnnnnnnnnnnnnnnnnnnnnnnnnnnnnnnnnnnnnnnnnnnnnnnnnnnnnnnnnnnnnnnnnnnnnnnnnnnnnnnnnnnnnnnnnnnnnnnnnnnnnnnnnnnnnnnnnnnnnnnnnnnnnnnnnnnnnnnnnnnnnnnnnnnnnnnnnnnnnnnnnnnnnnnnnnnnnnnnnnnnnnnnnnnnnnnnnnnnnnnnnnnnnnnnnnnnnnnnnnnnnnnnnnnnnnnnnnnnnnnnnnnnnnnnnnnnnnnnnnnnnnnnnnnnnnnnnnnnnnnnnnnnnnnnnnnnnnnnnnnnnnnnnnnnnnnnnnnnnnnnnnnnnnnnnnnnnnnnnnnnnnnnnnnnnnnnnnnnnnnnnnnnnnnnnnnnnnnnnnnnnnnnnnnnnnnnnnnnnnnnnnnnnnnnnnnnnnnnnnnnnnnnnnnnnnnnnnnnnnnnnnnnnnnnnnnnnnnnnnnnnnnnnnnnnnnnnnnnnnnnnnnnnnnnnnnnnnnnnnnnnnnnnnnnnnnnnnnnnnnnnnnnnnnnnnnnnnnnnnnnnnnnnnnnnnnnnnnnnnnnnnnnnnnnnnnnnnnnnnnnnnnnnnnnnnnnnnnnnnnnnnnnnnnnnnnnnnnnnnnnnnnnnnnnnnnnnnnnnnnnnnnnnnnnnnnnnnnnnnnnnnnnnnnnnnnnnnnnnnnnnnnnnnnnnnnnnnnnnnnnnnnnnnnnnnnnnnnnnnnnnnnnnnnnnnnnnnnnnnnnnnnnnnnnnnnnnnnnnnnnnnnnnnnnnnnnnnnnnnnnnnnnnnnnnnnnnnnnnnnnnnnnnnnnnnnnnnnnnnnnnnnnnnnnnnnnnnnnnnnnnnnnnnnnnnnnnnnnnnnnnnnnnnnnnnnnnnnnnnnnnnnnnnnnnnnnnnnnnnnnnnnnnnnnnnnnnnnnnnnnnnnnnnnnnnnnnnnnnnnnnnnnnnnnnnnnnnnnnnnnnnnnnnnnnnnnnnnnnnnnnnnnnnnnnnnnnnnnnnnnnnnnnnnnnnnnnnnnnnnnnnnnnnnnnnnnnnnnnnnnnnnnnnnnnnnnnnnnnnnnnnnnnnnnnnnnnnnnnnnnnnnnnnnnnnnnnnnnnnnnnnnnnnnnnnnnnnnnnnnnnnnnnnnnnnnnnnnnnnnnnnnnnnnnnnnnnnnnnnnnnnnnnnnnnnnnnnnnnnnnnnnnnnnnnnnnnnnnnnnnnnnnnnnnnnnnnnnnnnnnnnnnnnnnnnnnnnnnnnnnnnnnnnnnnnnnnnnnnnnnnnnnnnnnnnnnnnnnnnnnnnnnnnnnnnnnnnnnnnnnnnnnnnnnnnnnnnnnnnnnnnnnnnnnnnnnnnnnnnnnnnnnnnnnnnnnnnnnnnnnnnnnnnnnnnnnnnnnnnnnnnnnnnnnnnnnnnnnnnnnnnnnnnnnnnnnnnnnnnnnnnnnnnnnnnnnnnnnnnnnnnnnnnnnnnnnnnnnnnnnnnnnnnnnnnnnnnnnnnnnnnnnnnnnnnnnnnnnnnnnnnnnnnnnnnnnnnnnnnnnnnnnnnnnnnnnnnnnnnnnnnnnnnnnnnnnnnnnnnnnnnnnnnnnnnnnnnnnnnnnnnnnnnnnnnnnnnnnnnnnnnnnnnnnnnnnnnnnnnnnnnnnnnnnnnnnnnnnnnnnnnnnnnnnnnnnnnnnnnnnnnnnnnnnnnnnnnnnnnnnnnnnnnnnnnnnnnnnnnnnnnnnnnnnnnnnnnnnnnnnnnnnnnnnnnnnnnnnnnnnnnnnnnnnnnnnnnnnnnnnnnnnnnnnnnnnnnnnnnnnnnnnnnnnnnnnnnnnnnnnnnnnnnnnnnnnnnnnnnnnnnnnnnnnnnnnnnnnnnnnnnnnnnnnnnnnnnnnnnnnnnnnnnnnnnnnnnnnnnnnnnnnnnnnnnnnnnnnnnnnnnnnnnnnnnnnnnnnnnnnnnnnnnnnnnnnnnnnnnnnnnnnnnnnnnnnnnnnnnnnnnnnnnnnnnnnnnnnnnnnnnnnnnnnnnnnnnnnnnnnnnnnnnnnnnnnnnnnnnnnnnnnnnnnnnnnnnnnnnnnnnnnnnnnnnnnnnnnnnnnnnnnnnnnnnnnnnnnnnnnnnnnnnnnnnnnnnnnnnnnnnnnnnnnnnnnnnnnnnnnnnnnnnnnnnnnnnnnnnnnnnnnnnnnnnnnnnnnnnnnnnnnnnnnnnnnnnnnnnnnnnnnnnnnnnnnnnnnnnnnnnnnnnnnnnnnnnnnnnnnnnnnnnnnnnnnnnnnnnnnnnnnnnnnnnnnnnnnnnnnnnnnnnnnnnnnnnnnnnnnnnnnnnnnnnnnnnnnnnnnnnnnnnnnnnnnnnnnnnnnnnnnnnnnnnnnnnnnnnnnnnnnnnnnnnnnnnnnnnnnnnnnnnnnnnnnnnnnnnnnnnnnnnnnnnnnnnnnnnnnnnnnnnnnnnnnnnnnnnnnnnnnnnnnnnnnnnnnnnnnnnnnnnnnnnnnnnnnnnnnnnnnnnnnnnnnnnnnnnnnnnnnnnnnnnnnnnnnnnnnnnnnnnnnnnnnnnnnnnnnnnnnnnnnnnnnnnnnnnnnnnnnnnnnnnnnnnnnnnnnnnnnnnnnnnnnnnnnnnnnnnnnnnnnnnnnnnnnnnnnnnnnnnnnnnnnnnnnnnnnnnnnnnnnnnnnnnnnnnnnnnnnnnnnnnnnnnnnnnnnnnnnnnnnnnnnnnnnnnnnnnnnnnnnnnnnnnnnnnnnnnnnnnnnnnnnnnnnnnnnnnnnnnnnnnnnnnnnnnnnnnnnnnnnnnnnnnnnnnnnnnnnnnnnnnnnnnnnnnnnnnnnnnnnnnnnnnnnnnnnnnnnnnnnnnnnnnnnnnnnnnnnnnnnnnnnnnnnnnnnnnnnnnnnnnnnnnnnnnnnnnnnnnnnnnnnnnnnnnnnnnnnnnnnnnnnnnnnnnnnnnnnnnnnnnnnnnnnnnnnnnnnnnnnnnnnnnnnnnnnnnnnnnnnnnnnnnnnnnnnnnnnnnnnnnnnnnnnnnnnnnnnnnnnnnnnnnnnnnnnnnnnnnnnnnnnnnnnnnnnnnnnnnnnnnnnnnnnnnnnnnnnnnnnnnnnnnnnnnnnnnnnnnnnnnnnnnnnnnnnnnnnnnnnnnnnnnnnnnnnnnnnnnnnnnnnnnnnnnnnnnnnnnnnnnnnnnnnnnnnnnnnnnnnnnnnnnnnnnnnnnnnnnnnnnnnnnnnnnnnnnnnnnnnnnnnnnnnnnnnnnnnnnnnnnnnnnnnnnnnnnnnnnnnnnnnnnnnnnnnnnnnnnnnnnnnnnnnnnnnnnnnnnnnnnnnnnnnnnnnnnnnnnnnnnnnnnnnnnnnnnnnnnnnnnnnnnnnnnnnnnnnnnnnnnnnnnnnnnnnnnnnnnnnnnnnnnnnnnnnnnnnnnnnnnnnnnnnnnnnnnnnnnnnnnnnnnnnnnnnnnnnnnnnnnnnnnnnnnnnnnnnnnnnnnnnnnnnnnnnnnnnnnnnnnnnnnnnnnnnnnnnnnnnnnnnnnnnnnnnnnnnnnnnnnnnnnnnnnnnnnnnnnnnnnnnnnnnnnnnnnnnnnnnnnnnnnnnnnnnnnnnnnnnnnnnnnnnnnnnnnnnnnnnnnnnnnnnnnnnnnnnnnnnnnnnnnnnnnnnnnnnnnnnnnnnnnnnnnnnnnnnnnnnnnnnnnnnnnnnnnnnnnnnnnnnnnnnnnnnnnnnnnnnnnnnnnnnnnnnnnnnnnnnnnnnnnnnnnnnnnnnnnnnnnnnnnnnnnnnnnnnnnnnnnnnnnnnnnnnnnnnnnnnnnnnnnnnnnnnnnnnnnnnnnnnnnnnnnnnnnnnnnnnnnnnnnnnnnnnnnnnnnnnnnnnnnnnnnnnnnnnnnnnnnnnnnnnnnnnnnnnnnnnnnnnnnnnnnnnnnnnnnnnnnnnnnnnnnnnnnnnnnnnnnnnnnnnnnnnnnnnnnnnnnnnnnnnnnnnnnnnnnnnnnnnnnnnnnnnnnnnnnnnnnnnnnnnnnnnnnnnnnnnnnnnnnnnnnnnnnnnnnnnnnnnnnnnnnnnnnnnnnnnnnnnnnnnnnnnnnnnnnnnnnnnnnnnnnnnnnnnnnnnnnnnnnnnnnnnnnnnnnnnnnnnnnnnnnnnnnnnnnnnnnnnnnnnnnnnnnnnnnnnnnnnnnnnnnnnnnnnnnnnnnnnnnnnnnnnnnnnnnnnnnnnnnnnnnnnnnnnnnnnnnnnnnnnnnnnnnnnnnnnnnnnnnnnnnnnnnnnnnnnnnnnnnnnnnnnnnnnnnnnnnnnnnnnnnnnnnnnnnnnnnnnnnnnnnnnnnnnnnnnnnnnnnnnnnnnnnnnnnnnnnnnnnnnnnnnnnnnnnnnnnnnnnnnnnnnnnnnnnnnnnnnnnnnnnnnnnnnnnnnnnnnnnnnnnnnnnnnnnnnnnnnnnnnnnnnnnnnnnnnnnnnnnnnnnnnnnnnnnnnnnnnnnnnnnnnnnnnnnnnnnnnnnnnnnnnnnnnnnnnnnnnnnnnnnnnnnnnnnnnnnnnnnnnnnnnnnnnnnnnnnnnnnnnnnnnnnnnnnnnnnnnnnnnnnnnnnnnnnnnnnnnnnnnnnnnnnnnnnnnnnnnnnnnnnnnnnnnnnnnnnnnnnnnnnnnnnnnnnnnnnnnnnnnnnnnnnnnnnnnnnnnnnnnnnnnnnnnnnnnnnnnnnnnnnnnnnnnnnnnnnnnnnnnnnnnnnnnnnnnnnnnnnnnnnnnnnnnnnnnnnnnnnnnnnnnnnnnnnnnnnnnnnnnnnnnnnnnnnnnnnnnnnnnnnnnnnnnnnnnnnnnnnnnnnnnnnnnnnnnnnnnnnnnnnnnnnnnnnnnnnnnnnnnnnnnnnnnnnnnnnnnnnnnnnnnnnnnnnnnnnnnnnnnnnnnnnnnnnnnnnnnnnnnnnnnnnnnnnnnnnnnnnnnnnnnnnnnnnnnnnnnnnnnnnnnnnnnnnnnnnnnnnnnnnnnnnnnnnnnnnnnnnnnnnnnnnnnnnnnnnnnnnnnnnnnnnnnnnnnnnnnnnnnnnnnnnnnnnnnnnnnnnnnnnnnnnnnnnnnnnnnnnnnnnnnnnnnnnnnnnnnnnnnnnnnnnnnnnnnnnnnnnnnnnnnnnnnnnnnnnnnnnnnnnnnnnnnnnnnnnnnnnnnnnnnnnnnnnnnnnnnnnnnnnnnnnnnnnnnnnnnnnnnnnnnnnnnnnnnnnnnnnnnnnnnnnnnnnnnnnnnnnnnnnnnnnnnnnnnnnnnnnnnnnnnnnnnnnnnnnnnnnnnnnnnnnnnnnnnnnnnnnnnnnnnnnnnnnnnnnnnnnnnnnnnnnnnnnnnnnnnnnnnnnnnnnnnnnnnnnnnnnnnnnnnnnnnnnnnnnnnnnnnnnnnnnnnnnnnnnnnnnnnnnnnnnnnnnnnnnnnnnnnnnnnnnnnnnnnnnnnnnnnnnnnnnnnnnnnnnnnnnnnnnnnnnnnnnnnnnnnnnnnnnnnnnnnnnnnnnnnnnnnnnnnnnnnnnnnnnnnnnnnnnnnnnnnnnnnnnnnnnnnnnnnnnnnnnnnnnnnnnnnnnnnnnnnnnnnnnnnnnnnnnnnnnnnnnnnnnnnnnnnnnnnnnnnnnnnnnnnnnnnnnnnnnnnnnnnnnnnnnnnnnnnnnnnnnnnnnnnnnnnnnnnnnnnnnnnnnnnnnnnnnnnnnnnnnnnnnnnnnnnnnnnnnnnnnnnnnnnnnnnnnnnnnnnnnnnnnnnnnnnnnnnnnnnnnnnnnnnnnnnnnnnnnnnnnnnnnnnnnnnnnnnnnnnnnnnnnnnnnnnnnnnnnnnnnnnnnnnnnnnnnnnnnnnnnnnnnnnnnnnnnnnnnnnnnnnnnnnnnnnnnnnnnnnnnnnnnnnnnnnnnnnnnnnnnnnnnnnnnnnnnnnnnnnnnnnnnnnnnnnnnnnnnnnnnnnnnnnnnnnnnnnnnnnnnnnnnnnnnnnnnnnnnnnnnnnnnnnnnnnnnnnnnnnnnnnnnnnnnnnnnnnnnnnnnnnnnnnnnnnnnnnnnnnnnnnnnnnnnnnnnnnnnnnnnnnnnnnnnnnnnnnnnnnnnnnnnnnnnnnnnnnnnnnnnnnnnnnnnnnnnnnnnnnnnnnnnnnnnnnnnnnnnnnnnnnnnnnnnnnnnnnnnnnnnnnnnnnnnnnnnnnnnnnnnnnnnnnnnnnnnnnnnnnnnnnnnnnnnnnnnnnnnnnnnnnnnnnnnnnnnnnnnnnnnnnnnnnnnnnnnnnnnnnnnnnnnnnnnnnnnnnnnnnnnnnnnnnnnnnnnnnnnnnnnnnnnnnnnnnnnnnnnnnnnnnnnnnnnnnnnnnnnnnnnnnnnnnnnnnnnnnnnnnnnnnnnnnnnnnnnnnnnnnnnnnnnnnnnnnnnnnnnnnnnnnnnnnnnnnnnnnnnnnnnnnnnnnnnnnnnnnnnnnnnnnnnnnnnnnnnnnnnnnnnnnnnnnnnnnnnnnnnnnnnnnnnnnnnnnnnnnnnnnnnnnnnnnnnnnnnnnnnnnnnnnnnnnnnnnnnnnnnnnnnnnnnnnnnnnnnnnnnnnnnnnnnnnnnnnnnnnnnnnnnnnnnnnnnnnnnnnnnnnnnnnnnnnnnnnnnnnnnnnnnnnnnnnnnnnnnnnnnnnnnnnnnnnnnnnnnnnnnnnnnnnnnnnnnnnnnnnnnnnnnnnnnnnnnnnnnnnnnnnnnnnnnnnnnnnnnnnnnnnnnnnnnnnnnnnnnnnnnnnnnnnnnnnnnnnnnnnnnnnnnnnnnnnnnnnnnnnnnnnnnnnnnnnnnnnnnnnnnnnnnnnnnnnnnnnnnnnnnnnnnnnnnnnnnnnnnnnnnnnnnnnnnnnnnnnnnnnnnnnnnnnnnnnnnnnnnnnnnnnnnnnnnnnnnnnnnnnnnnnnnnnnnnnnnnnnnnnnnnnnnnnnnnnnnnnnnnnnnnnnnnnnnnnnnnnnnnnnnnnnnnnnnnnnnnnnnnnnnnnnnnnnnnnnnnnnnnnnnnnnnnnnnnnnnnnnnnnnnnnnnnnnnnnnnnnnnnnnnnnnnnnnnnnnnnnnnnnnnnnnnnnnnnnnnnnnnnnnnnnnnnnnnnnnnnnnnnnnnnnnnnnnnnnnnnnnnnnnnnnnnnnnnnnnnnnnnnnnnnnnnnnnnnnnnnnnnnnnnnnnnnnnnnnnnnnnnnnnnnnnnnnnnnnnnnnnnnnnnnnnnnnnnnnnnnnnnnnnnnnnnnnnnnnnnnnnnnnnnnnnnnnnnnnnnnnnnnnnnnnnnnnnnnnnnnnnnnnnnnnnnnnnnnnnnnnnnnnnnnnnnnnnnnnnnnnnnnnnnnnnnnnnnnnnnnnnnnnnnnnnnnnnnnnnnnnnnnnnnnnnnnnnnnnnnnnnnnnnnnnnnnnnnnnnnnnnnnnnnnnnnnnnnnnnnnnnnnnnnnnnnnnnnnnnnnnnnnnnnnnnnnnnnnnnnnnnnnnnnnnnnnnnnnnnnnnnnnnnnnnnnnnnnnnnnnnnnnnnnnnnnnnnnnnnnnnnnnnnnnnnnnnnnnnnnnnnnnnnnnnnnnnnnnnnnnnnnnnnnnnnnnnnnnnnnnnnnnnnnnnnnnnnnnnnnnnnnnnnnnnnnnnnnnnnnnnnnnnnnnnnnnnnnnnnnnnnnnnnnnnnnnnnnnnnnnnnnnnnnnnnnnnnnnnnnnnnnnnnnnnnnnnnnnnnnnnnnnnnnnnnnnnnnnnnnnnnnnnnnnnnnnnnnnnnnnnnnnnnnnnnnnnnnnnnnnnnnnnnnnnnnnnnnnnnnnnnnnnnnnnnnnnnnnnnnnnnnnnnnnnnnnnnnnnnnnnnnnnnnnnnnnnnnnnnnnnnnnnnnnnnnnnnnnnnnnnnnnnnnnnnnnnnnnnnnnnnnnnnnnnnnnnnnnnnnnnnnnnnnnnnnnnnnnnnnnnnnnnnnnnnnnnnnnnnnnnnnnnnnnnnnnnnnnnnnnnnnnnnnnnnnnnnnnnnnnnnnnnnnnnnnnnnnnnnnnnnnnnnnnnnnnnnnnnnnnnnnnnnnnnnnnnnnnnnnnnnnnnnnnnnnnnnnnnnnnnnnnnnnnnnnnnnnnnnnnnnnnnnnnnnnnnnnnnnnnnnnnnnnnnnnnnnnnnnnnnnnnnnnnnnnnnnnnnnnnnnnnnnnnnnnnnnnnnnnnnnnnnnnnnnnnnnnnnnnnnnnnnnnnnnnnnnnnnnnnnnnnnnnnnnnnnnnnnnnnnnnnnnnnnnnnnnnnnnnnnnnnnnnnnnnnnnnnnnnnnnnnnnnnnnnnnnnnnnnnnnnnnnnnnnnnnnnnnnnnnnnnnnnnnnnnnnnnnnnnnnnnnnnnnnnnnnnnnnnnnnnnnnnnnnnnnnnnnnnnnnnnnnnnnnnnnnnnnnnnnnnnnnnnnnnnnnnnnnnnnnnnnnnnnnnnnnnnnnnnnnnnnnnnnnnnnnnnnnnnnnnnnnnnnnnnnnnnnnnnnnnnnnnnnnnnnnnnnnnnnnnnnnnnnnnnnnnnnnnnnnnnnnnnnnnnnnnnnnnnnnnnnnnnnnnnnnnnnnnnnnnnnnnnnnnnnnnnnnnnnnnnnnnnnnnnnnnnnnnnnnnnnnnnnnnnnnnnnnnnnnnnnnnnnnnnnnnnnnnnnnnnnnnnnnnnnnnnnnnnnnnnnnnnnnnnnnnnnnnnnnnnnnnnnnnnnnnnnnnnnnnnnnnnnnnnnnnnnnnnnnnnnnnnnnnnnnnnnnnnnnnnnnnnnnnnnnnnnnnnnnnnnnnnnnnnnnnnnnnnnnnnnnnnnnnnnnnnnnnnnnnnnnnnnnnnnnnnnnnnnnnnnnnnnnnnnnnnnnnnnnnnnnnnnnnnnnnnnnnnnnnnnnnnnnnnnnnnnnnnnnnnnnnnnnnnnnnnnnnnnnnnnnnnnnnnnnnnnnnnnnnnnnnnnnnnnnnnnnnnnnnnnnnnnnnnnnnnnnnnnnnnnnnnnnnnnnnnnnnnnnnnnnnnnnnnnnnnnnnnnnnnnnnnnnnnnnnnnnnnnnnnnnnnnnnnnnnnnnnnnnnnnnnnnnnnnnnnnnnnnnnnnnnnnnnnnnnnnnnnnnnnnnnnnnnnnnnnnnnnnnnnnnnnnnnnnnnnnnnnnnnnnnnnnnnnnnnnnnnnnnnnnnnnnnnnnnnnnnnnnnnnnnnnnnnnnnnnnnnnnnnnnnnnnnnnnnnnnnnnnnnnnnnnnnnnnnnnnnnnnnnnnnnnnnnnnnnnnnnnnnnnnnnnnnnnnnnnnnnnnnnnnnnnnnnnnnnnnnnnnnnnnnnnnnnnnnnnnnnnnnnnnnnnnnnnnnnnnnnnnnnnnnnnnnnnnnnnnnnnnnnnnnnnnnnnnnnnnnnnnnnnnnnnnnnnnnnnnnnnnnnnnnnnnnnnnnnnnnnnnnnnnnnnnnnnnnnnnnnnnnnnnnnnnnnnnnnnnnnnnnnnnnnnnnnnnnnnnnnnnnnnnnnnnnnnnnnnnnnnnnnnnnnnnnnnnnnnnnnnnnnnnnnnnnnnnnnnnnnnnnnnnnnnnnnnnnnnnnnnnnnnnnnnnnnnnnnnnnnnnnnnnnnnnnnnnnnnnnnnnnnnnnnnnnnnnnnnnnnnnnnnnnnnnnnnnnnnnnnnnnnnnnnnnnnnnnnnnnnnnnnnnnnnnnnnnnnnnnnnnnnnnnnnnnnnnnnnnnnnnnnnnnnnnnnnnnnnnnnnnnnnnnnnnnnnnnnnnnnnnnnnnnnnnnnnnnnnnnnnnnnnnnnnnnnnnnnnnnnnnnnnnnnnnnnnnnnnnnnnnnnnnnnnnnnnnnnnnnnnnnnnnnnnnnnnnnnnnnnnnnnnnnnnnnnnnnnnnnnnnnnnnnnnnnnnnnnnnnnnnnnnnnnnnnnnnnnnnnnnnnnnnnnnnnnnnnnnnnnnnnnnnnnnnnnnnnnnnnnnnnnnnnnnnnnnnnnnnnnnnnnnnnnnnnnnnnnnnnnnnnnnnnnnnnnnnnnnnnnnnnnnnnnnnnnnnnnnnnnnnnnnnnnnnnnnnnnnnnnnnnnnnnnnnnnnnnnnnnnnnnnnnnnnnnnnnnnnnnnnnnnnnnnnnnnnnnnnnnnnnnnnnnnnnnnnnnnnnnnnnnnnnnnnnnnnnnnnnnnnnnnnnnnnnnnnnnnnnnnnnnnnnnnnnnnnnnnnnnnnnnnnnnnnnnnnnnnnnnnnnnnnnnnnnnnnnnnnnnnnnnnnnnnnnnnnnnnnnnnnnnnnnnnnnnnnnnnnnnnnnnnnnnnnnnnnnnnnnnnnnnnnnnnnnnnnnnnnnnnnnnnnnnnnnnnnnnnnnnnnnnnnnnnnnnnnnnnnnnnnnnnnnnnnnnnnnnnnnnnnnnnnnnnnnnnnnnnnnnnnnnnnnnnnnnnnnnnnnnnnnnnnnnnnnnnnnnnnnnnnnnnnnnnnnnnnnnnnnnnnnnnnnnnnnnnnnnnnnnnnnnnnnnnnnnnnnnnnnnnnnnnnnnnnnnnnnnnnnnnnnnnnnnnnnnnnnnnnnnnnnnnnnnnnnnnnnnnnnnnnnnnnnnnnnnnnnnnnnnnnnnnnnnnnnnnnnnnnnnnnnnnnnnnnnnnnnnnnnnnnnnnnnnnnnnnnnnnnnnnnnnnnnnnnnnnnnnnnnnnnnnnnnnnnnnnnnnnnnnnnnnnnnnnnnnnnnnnnnnnnnnnnnnnnnnnnnnnnnnnnnnnnnnnnnnnnnnnnnnnnnnnnnnnnnnnnnnnnnnnnnnnnnnnnnnnnnnnnnnnnnnnnnnnnnnnnnnnnnnnnnnnnnnnnnnnnnnnnnnnnnnnnnnnnnnnnnnnnnnnnnnnnnnnnnnnnnnnnnnnnnnnnnnnnnnnnnnnnnnnnnnnnnnnnnnnnnnnnnnnnnnnnnnnnnnnnnnnnnnnnnnnnnnnnnnnnnnnnnnnnnnnnnnnnnnnnnnnnnnnnnnnnnnnnnnnnnnnnnnnnnnnnnnnnnnnnnnnnnnnnnnnnnnnnnnnnnnnnnnnnnnnnnnnnnnnnnnnnnnnnnnnnnnnnnnnnnnnnnnnnnnnnnnnnnnnnnnnnnnnnnnnnnnnnnnnnnnnnnnnnnnnnnnnnnnnnnnnnnnnnnnnnnnnnnnnnnnnnnnnnnnnnnnnnnnnnnnnnnnnnnnnnnnnnnnnnnnnnnnnnnnnnnnnnnnnnnnnnnnnnnnnnnnnnnnnnnnnnnnnnnnnnnnnnnnnnnnnnnnnnnnnnnnnnnnnnnnnnnnnnnnnnnnnnnnnnnnnnnnnnnnnnnnnnnnnnnnnnnnnnnnnnnnnnnnnnnnnnnnnnnnnnnnnnnnnnnnnnnnnnnnnnnnnnnnnnnnnnnnnnnnnnnnnnnnnnnnnnnnnnnnnnnnnnnnnnnnnnnnnnnnnnnnnnnnnnnnnnnnnnnnnnnnnnnnnnnnnnnnnnnnnnnnnnnnnnnnnnnnnnnnnnnnnnnnnnnnnnnnnnnnnnnnnnnnnnnnnnnnnnnnnnnnnnnnnnnnnnnnnnnnnnnnnnnnnnnnnnnnnnnnnnnnnnnnnnnnnnnnnnnnnnnnnnnnnnnnnnnnnnnnnnnnnnnnnnnnnnnnnnnnnnnnnnnnnnnnnnnnnnnnnnnnnnnnnnnnnnnnnnnnnnnnnnnnnnnnnnnnnnnnnnnnnnnnnnnnnnnnnnnnnnnnnnnnnnnnnnnnnnnnnnnnnnnnnnnnnnnnnnnnnnnnnnnnnnnnnnnnnnnnnnnnnnnnnnnnnnnnnnnnnnnnnnnnnnnnnnnnnnnnnnnnnnnnnnnnnnnnnnnnnnnnnnnnnnnnnnnnnnnnnnnnnnnnnnnnnnnnnnnnnnnnnnnnnnnnnnnnnnnnnnnnnnnnnnnnnnnnnnnnnnnnnnnnnnnnnnnnnnnnnnnnnnnnnnnnnnnnnnnnnnnnnnnnnnnnnnnnnnnnnnnnnnnnnnnnnnnnnnnnnnnnnnnnnnnnnnnnnnnnnnnnnnnnnnnnnnnnnnnnnnnnnnnnnnnnnnnnnnnnnnnnnnnnnnnnnnnnnnnnnnnnnnnnnnnnnnnnnnnnnnnnnnnnnnnnnnnnnnnnnnnnnnnnnnnnnnnnnnnnnnnnnnnnnnnnnnnnnnnnnnnnnnnnnnnnnnnnnnnnnnnnnnnnnnnnnnnnnnnnnnnnnnnnnnnnnnnnnnnnnnnnnnnnnnnnnnnnnnnnnnnnnnnnnnnnnnnnnnnnnnnnnnnnnnnnnnnnnnnnnnnnnnnnnnnnnnnnnnnnnnnnnnnnnnnnnnnnnnnnnnnnnnnnnnnnnnnnnnnnnnnnnnnnnnnnnnnnnnnnnnnnnnnnnnnnnnnnnnnnnnnnnnnnnnnnnnnnnnnnnnnnnnnnnnnnnnnnnnnnnnnnnnnnnnnnnnnnnnnnnnnnnnnnnnnnnnnnnnnnnnnnnnnnnnnnnnnnnnnnnnnnnnnnnnnnnnnnnnnnnnnnnnnnnnnnnnnnnnnnnnnnnnnnnnnnnnnnnnnnnnnnnnnnnnnnnnnnnnnnnnnnnnnnnnnnnnnnnnnnnnnnnnnnnnnnnnnnnnnnnnnnnnnnnnnnnnnnnnnnnnnnnnnnnnnnnnnnnnnnnnnnnnnnnnnnnnnnnnnnnnnnnnnnnnnnnnnnnnnnnnnnnnnnnnnnnnnnnnnnnnnnnnnnnnnnnnnnnnnnnnnnnnnnnnnnnnnnnnnnnnnnnnnnnnnnnnnnnnnnnnnnnnnnnnnnnnnnnnnnnnnnnnnnnnnnnnnnnnnnnnnnnnnnnnnnnnnnnnnnnnnnnnnnnnnnnnnnnnnnnnnnnnnnnnnnnnnnnnnnnnnnnnnnnnnnnnnnnnnnnnnnnnnnnnnnnnnnnnnnnnnnnnnnnnnnnnnnnnnnnnnnnnnnnnnnnnnnnnnnnnnnnnnnnnnnnnnnnnnnnnnnnnnnnnnnnnnnnnnnnnnnnnnnnnnnnnnnnnnnnnnnnnnnnnnnnnnnnnnnnnnnnnnnnnnnnnnnnnnnnnnnnnnnnnnnnnnnnnnnnnnnnnnnnnnnnnnnnnnnnnnnnnnnnnnnnnnnnnnnnnnnnnnnnnnnnnnnnnnnnnnnnnnnnnnnnnnnnnnnnnnnnnnnnnnnnnnnnnnnnnnnnnnnnnnnnnnnnnnnnnnnnnnnnnnnnnnnnnnnnnnnnnnnnnnnnnnnnnnnnnnnnnnnnnnnnnnnnnnnnnnnnnnnnnnnnnnnnnnnnnnnnnnnnnnnnnnnnnnnnnnnnnnnnnnnnnnnnnnnnnnnnnnnnnnnnnnnnnnnnnnnnnnnnnnnnnnnnnnnnnnnnnnnnnnnnnnnnnnnnnnnnnnnnnnnnnnnnnnnnnnnnnnnnnnnnnnnnnnnnnnnnnnnnnnnnnnnnnnnnnnnnnnnnnnnnnnnnnnnnnnnnnnnnnnnnnnnnnnnnnnnnnnnnnnnnnnnnnnnnnnnnnnnnnnnnnnnnnnnnnnnnnnnnnnnnnnnnnnnnnnnnnnnnnnnnnnnnnnnnnnnnnnnnnnnnnnnnnnnnnnnnnnnnnnnnnnnnnnnnnnnnnnnnnnnnnnnnnnnnnnnnnnnnnnnnnnnnnnnnnnnnnnnnnnnnnnnnnnnnnnnnnnnnnnnnnnnnnnnnnnnnnnnnnnnnnnnnnnnnnnnnnnnnnnnnnnnnnnnnnnnnnnnnnnnnnnnnnnnnnnnnnnnnnnnnnnnnnnnnnnnnnnnnnnnnnnnnnnnnnnnnnnnnnnnnnnnnnnnnnnnnnnnnnnnnnnnnnnnnnnnnnnnnnnnnnnnnnnnnnnnnnnnnnnnnnnnnnnnnnnnnnnnnnnnnnnnnnnnnnnnnnnnnnnnnnnnnnnnnnnnnnnnnnnnnnnnnnnnnnnnnnnnnnnnnnnnnnnnnnnnnnnnnnnnnnnnnnnnnnnnnnnnnnnnnnnnnnnnnnnnnnnnnnnnnnnnnnnnnnnnnnnnnnnnnnnnnnnnnnnnnnnnnnnnnnnnnnnnnnnnnnnnnnnnnnnnnnnnnnnnnnnnnnnnnnnnnnnnnnnnnnnnnnnnnnnnnnnnnnnnnnnnnnnnnnnnnnnnnnnnnnnnnnnnnnnnnnnnnnnnnnnnnnnnnnnnnnnnnnnnnnnnnnnnnnnnnnnnnnnnnnnnnnnnnnnnnnnnnnnnnnnnnnnnnnnnnnnnnnnnnnnnnnnnnnnnnnnnnnnnnnnnnnnnnnnnnnnnnnnnnnnnnnnnnnnnnnnnnnnnnnnnnnnnnnnnnnnnnnnnnnnnnnnnnnnnnnnnnnnnnnnnnnnnnnnnnnnnnnnnnnnnnnnnnnnnnnnnnnnnnnnnnnnnnnnnnnnnnnnnnnnnnnnnnnnnnnnnnnnnnnnnnnnnnnnnnnnnnnnnnnnnnnnnnnnnnnnnnnnnnnnnnnnnnnnnnnnnnnnnnnnnnnnnnnnnnnnnnnnnnnnnnnnnnnnnnnnnnnnnnnnnnnnnnnnnnnnnnnnnnnnnnnnnnnnnnnnnnnnnnnnnnnnnnnnnnnnnnnnnnnnnnnnnnnnnnnnnnnnnnnnnnnnnnnnnnnnnnnnnnnnnnnnnnnnnnnnnnnnnnnnnnnnnnnnnnnnnnnnnnnnnnnnnnnnnnnnnnnnnnnnnnnnnnnnnnnnnnnnnnnnnnnnnnnnnnnnnnnnnnnnnnnnnnnnnnnnnnnnnnnnnnnnnnnnnnnnnnnnnnnnnnnnnnnnnnnnnnnnnnnnnnnnnnnnnnnnnnnnnnnnnnnnnnnnnnnnnnnnnnnnnnnnnnnnnnnnnnnnnnnnnnnnnnnnnnnnnnnnnnnnnnnnnnnnnnnnnnnnnnnnnnnnnnnnnnnnnnnnnnnnnnnnnnnnnnnnnnnnnnnnnnnnnnnnnnnnnnnnnnnnnnnnnnnnnnnnnnnnnnnnnnnnnnnnnnnnnnnnnnnnnnnnnnnnnnnnnnnnnnnnnnnnnnnnnnnnnnnnnnnnnnnnnnnnnnnnnnnnnnnnnnnnnnnnnnnnnnnnnnnnnnnnnnnnnnnnnnnnnnnnnnnnnnnnnnnnnnnnnnnnnnnnnnnnnnnnnnnnnnnnnnnnnnnnnnnnnnnnnnnnnnnnnnnnnnnnnnnnnnnnnnnnnnnnnnnnnnnnnnnnnnnnnnnnnnnnnnnnnnnnnnnnnnnnnnnnnnnnnnnnnnnnnnnnnnnnnnnnnnnnnnnnnnnnnnnnnnnnnnnnnnnnnnnnnnnnnnnnnnnnnnnnnnnnnnnnnnnnnnnnnnnnnnnnnnnnnnnnnnnnnnnnnnnnnnnnnnnnnnnnnnnnnnnnnnnnnnnnnnnnnnnnnnnnnnnnnnnnnnnnnnnnnnnnnnnnnnnnnnnnnnnnnnnnnnnnnnnnnnnnnnnnnnnnnnnnnnnnnnnnnnnnnnnnnnnnnnnnnnnnnnnnnnnnnnnnnnnnnnnnnnnnnnnnnnnnnnnnnnnnnnnnnnnnnnnnnnnnnnnnnnnnnnnnnnnnnnnnnnnnnnnnnnnnnnnnnnnnnnnnnnnnnnnnnnnnnnnnnnnnnnnnnnnnnnnnnnnnnnnnnnnnnnnnnnnnnnnnnnnnnnnnnnnnnnnnnnnnnnnnnnnnnnnnnnnnnnnnnnnnnnnnnnnnnnnnnnnnnnnnnnnnnnnnnnnnnnnnnnnnnnnnnnnnnnnnnnnnnnnnnnnnnnnnnnnnnnnnnnnnnnnnnnnnnnnnnnnnnnnnnnnnnnnnnnnnnnnnnnnnnnnnnnnnnnnnnnnnnnnnnnnnnnnnnnnnnnnnnnnnnnnnnnnnnnnnnnnnnnnnnnnnnnnnnnnnnnnnnnnnnnnnnnnnnnnnnnnnnnnnnnnnnnnnnnnnnnnnnnnnnnnnnnnnnnnnnnnnnnnnnnnnnnnnnnnnnnnnnnnnnnnnnnnnnnnnnnnnnnnnnnnnnnnnnnnnnnnnnnnnnnnnnnnnnnnnnnnnnnnnnnnnnnnnnnnnnnnnnnnnnnnnnnnnnnnnnnnnnnnnnnnnnnnnnnnnnnnnnnnnnnnnnnnnnnnnnnnnnnnnnnnnnnnnnnnnnnnnnnnnnnnnnnnnnnnnnnnnnnnnnnnnnnnnnnnnnnnnnnnnnnnnnnnnnnnnnnnnnnnnnnnnnnnnnnnnnnnnnnnnnnnnnnnnnnnnnnnnnnnnnnnnnnnnnnnnnnnnnnnnnnnnnnnnnnnnnnnnnnnnnnnnnnnnnnnnnnnnnnnnnnnnnnnnnnnnnnnnnnnnnnnnnnnnnnnnnnnnnnnnnnnnnnnnnnnnnnnnnnnnnnnnnnnnnnnnnnnnnnnnnnnnnnnnnnnnnnnnnnnnnnnnnnnnnnnnnnnnnnnnnnnnnnnnnnnnnnnnnnnnnnnnnnnnnnnnnnnnnnnnnnnnnnnnnnnnnnnnnnnnnnnnnnnnnnnnnnnnnnnnnnnnnnnnnnnnnnnnnnnnnnnnnnnnnnnnnnnnnnnnnnnnnnnnnnnnnnnnnnnnnnnnnnnnnnnnnnnnnnnnnnnnnnnnnnnnnnnnnnnnnnnnnnnnnnnnnnnnnnnnnnnnnnnnnnnnnnnnnnnnnnnnnnnnnnnnnnnnnnnnnnnnnnnnnnnnnnnnnnnnnnnnnnnnnnnnnnnnnnnnnnnnnnnnnnnnnnnnnnnnnnnnnnnnnnnnnnnnnnnnnnnnnnnnnnnnnnnnnnnnnnnnnnnnnnnnnnnnnnnnnnnnnnnnnnnnnnnnnnnnnnnnnnnnnnnnnnnnnnnnnnnnnnnnnnnnnnnnnnnnnnnnnnnnnnnnnnnnnnnnnnnnnnnnnnnnnnnnnnnnnnnnnnnnnnnnnnnnnnnnnnnnnnnnnnnnnnnnnnnnnnnnnnnnnnnnnnnnnnnnnnnnnnnnnnnnnnnnnnnnnnnnnnnnnnnnnnnnnnnnnnnnnnnnnnnnnnnnnnnnnnnnnnnnnnnnnnnnnnnnnnnnnnnnnnnnnnnnnnnnnnnnnnnnnnnnnnnnnnnnnnnnnnnnnnnnnnnnnnnnnnnnnnnnnnnnnnnnnnnnnnnnnnnnnnnnnnnnnnnnnnnnnnnnnnnnnnnnnnnnnnnnnnnnnnnnnnnnnnnnnnnnnnnnnnnnnnnnnnnnnnnnnnnnnnnnnnnnnnnnnnnnnnnnnnnnnnnnnnnnnnnnnnnnnnnnnnnnnnnnnnnnnnnnnnnnnnnnnnnnnnnnnnnnnnnnnnnnnnnnnnnnnnnnnnnnnnnnnnnnnnnnnnnnnnnnnnnnnnnnnnnnnnnnnnnnnnnnnnnnnnnnnnnnnnnnnnnnnnnnnnnnnnnnnnnnnnnnnnnnnnnnnnnnnnnnnnnnnnnnnnnnnnnnnnnnnnnnnnnnnnnnnnnnnnnnnnnnnnnnnnnnnnnnnnnnnnnnnnnnnnnnnnnnnnnnnnnnnnnnnnnnnnnnnnnnnnnnnnnnnnnnnnnnnnnnnnnnnnnnnnnnnnnnnnnnnnnnnnnnnnnnnnnnnnnnnnnnnnnnnnnnnnnnnnnnnnnnnnnnnnnnnnnnnnnnnnnnnnnnnnnnnnnnnnnnnnnnnnnnnnnnnnnnnnnnnnnnnnnnnnnnnnnnnnnnnnnnnnnnnnnnnnnnnnnnnnnnnnnnnnnnnnnnnnnnnnnnnnnnnnnnnnnnnnnnnnnnnnnnnnnnnnnnnnnnnnnnnnnnnnnnnnnnnnnnnnnnnnnnnnnnnnnnnnnnnnnnnnnnnnnnnnnnnnnnnnnnnnnnnnnnnnnnnnnnnnnnnnnnnnnnnnnnnnnnnnnnnnnnnnnnnnnnnnnnnnnnnnnnnnnnnnnnnnnnnnnnnnnnnnnnnnnnnnnnnnnnnnnnnnnnnnnnnnnnnnnnnnnnnnnnnnnnnnnnnnnnnnnnnnnnnnnnnnnnnnnnnnnnnnnnnnnnnnnnnnnnnnnnnnnnnnnnnnnnnnnnnnnnnnnnnnnnnnnnnnnnnnnnnnnnnnnnnnnnnnnnnnnnnnnnnnnnnnnnnnnnnnnnnnnnnnnnnnnnnnnnnnnnnnnnnnnnnnnnnnnnnnnnnnnnnnnnnnnnnnnnnnnnnnnnnnnnnnnnnnnnnnnnnnnnnnnnnnnnnnnnnnnnnnnnnnnnnnnnnnnnnnnnnnnnnnnnnnnnnnnnnnnnnnnnnnnnnnnnnnnnnnnnnnnnnnnnnnnnnnnnnnnnnnnnnnnnnnnnnnnnnnnnnnnnnnnnnnnnnnnnnnnnnnnnnnnnnnnnnnnnnnnnnnnnnnnnnnnnnnnnnnnnnnnnnnnnnnnnnnnnnnnnnnnnnnnnnnnnnnnnnnnnnnnnnnnnnnnnnnnnnnnnnnnnnnnnnnnnnnnnnnnnnnnnnnnnnnnnnnnnnnnnnnnnnnnnnnnnnnnnnnnnnnnnnnnnnnnnnnnnnnnnnnnnnnnnnnnnnnnnnnnnnnnnnnnnnnnnnnnnnnnnnnnnnnnnnnnnnnnnnnnnnnnnnnnnnnnnnnnnnnnnnnnnnnnnnnnnnnnnnnnnnnnnnnnnnnnnnnnnnnnnnnnnnnnnnnnnnnnnnnnnnnnnnnnnnnnnnnnnnnnnnnnnnnnnnnnnnnnnnnnnnnnnnnnnnnnnnnnnnnnnnnnnnnnnnnnnnnnnnnnnnnnnnnnnnnnnnnnnnnnnnnnnnnnnnnnnnnnnnnnnnnnnnnnnnnnnnnnnnnnnnnnnnnnnnnnnnnnnnnnnnnnnnnnnnnnnnnnnnnnnnnnnnnnnnnnnnnnnnnnnnnnnnnnnnnnnnnnnnnnnnnnnnnnnnnnnnnnnnnnnnnnnnnnnnnnnnnnnnnnnnnnnnnnnnnnnnnnnnnnnnnnnnnnnnnnnnnnnnnnnnnnnnnnnnnnnnnnnnnnnnnnnnnnnnnnnnnnnnnnnnnnnnnnnnnnnnnnnnnnnnnnnnnnnnnnnnnnnnnnnnnnnnnnnnnnnnnnnnnnnnnnnnnnnnnnnnnnnnnnnnnnnnnnnnnnnnnnnnnnnnnnnnnnnnnnnnnnnnnnnnnnnnnnnnnnnnnnnnnnnnnnnnnnnnnnnnnnnnnnnnnnnnnnnnnnnnnnnnnnnnnnnnnnnnnnnnnnnnnnnnnnnnnnnnnnnnnnnnnnnnnnnnnnnnnnnnnnnnnnnnnnnnnnnnnnnnnnnnnnnnnnnnnnnnnnnnnnnnnnnnnnnnnnnnnnnnnnnnnnnnnnnnnnnnnnnnnnnnnnnnnnnnnnnnnnnnnnnnnnnnnnnnnnnnnnnnnnnnnnnnnnnnnnnnnnnnnnnnnnnnnnnnnnnnnnnnnnnnnnnnnnnnnnnnnnnnnnnnnnnnnnnnnnnnnnnnnnnnnnnnnnnnnnnnnnnnnnnnnnnnnnnnnnnnnnnnnnnnnnnnnnnnnnnnnnnnnnnnnnnnnnnnnnnnnnnnnnnnnnnnnnnnnnnnnnnnnnnnnnnnnnnnnnnnnnnnnnnnnnnnnnnnnnnnnnnnnnnnnnnnnnnnnnnnnnnnnnnnnnnnnnnnnnnnnnnnnnnnnnnnnnnnnnnnnnnnnnnnnnnnnnnnnnnnnnnnnnnnnnnnnnnnnnnnnnnnnnnnnnnnnnnnnnnnnnnnnnnnnnnnnnnnnnnnnnnnnnnnnnnnnnnnnnnnnnnnnnnnnnnnnnnnnnnnnnnnnnnnnnnnnnnnnnnnnnnnnnnnnnnnnnnnnnnnnnnnnnnnnnnnnnnnnnnnnnnnnnnnnnnnnnnnnnnnnnnnnnnnnnnnnnnnnnnnnnnnnnnnnnnnnnnnnnnnnnnnnnnnnnnnnnnnnnnnnnnnnnnnnnnnnnnnnnnnnnnnnnnnnnnnnnnnnnnnnnnnnnnnnnnnnnnnnnnnnnnnnnnnnnnnnnnnnnnnnnnnnnnnnnnnnnnnnnnnnnnnnnnnnnnnnnnnnnnnnnnnnnnnnnnnnnnnnnnnnnnnnnnnnnnnnnnnnnnnnnnnnnnnnnnnnnnnnnnnnnnnnnnnnnnnnnnnnnnnnnnnnnnnnnnnnnnnnnnnnnnnnnnnnnnnnnnnnnnnnnnnnnnnnnnnnnnnnnnnnnnnnnnnnnnnnnnnnnnnnnnnnnnnnnnnnnnnnnnnnnnnnnnnnnnnnnnnnnnnnnnnnnnnnnnnnnnnnnnnnnnnnnnnnnnnnnnnnnnnnnnnnnnnnnnnnnnnnnnnnnnnnnnnnnnnnnnnnnnnnnnnnnnnnnnnnnnnnnnnnnnnnnnnnnnnnnnnnnnnnnnnnnnnnnnnnnnnnnnnnnnnnnnnnnnnnnnnnnnnnnnnnnnnnnnnnnnnnnnnnnnnnnnnnnnnnnnnnnnnnnnnnnnnnnnnnnnnnnnnnnnnnnnnnnnnnnnnnnnnnnnnnnnnnnnnnnnnnnnnnnnnnnnnnnnnnnnnnnnnnnnnnnnnnnnnnnnnnnnnnnnnnnnnnnnnnnnnnnnnnnnnnnnnnnnnnnnnnnnnnnnnnnnnnnnnnnnnnnnnnnnnnnnnnnnnnnnnnnnnnnnnnnnnnnnnnnnnnnnnnnnnnnnnnnnnnnnnnnnnnnnnnnnnnnnnnnnnnnnnnnnnnnnnnnnnnnnnnnnnnnnnnnnnnnnnnnnnnnnnnnnnnnnnnnnnnnnnnnnnnnnnnnnnnnnnnnnnnnnnnnnnnnnnnnnnnnnnnnnnnnnnnnnnnnnnnnnnnnnnnnnnnnnnnnnnnnnnnnnnnnnnnnnnnnnnnnnnnnnnnnnnnnnnnnnnnnnnnnnnnnnnnnnnnnnnnnnnnnnnnnnnnnnnnnnnnnnnnnnnnnnnnnnnnnnnnnnnnnnnnnnnnnnnnnnnnnnnnnnnnnnnnnnnnnnnnnnnnnnnnnnnnnnnnnnnnnnnnnnnnnnnnnnnnnnnnnnnnnnnnnnnnnnnnnnnnnnnnnnnnnnnnnnnnnnnnnnnnnnnnnnnnnnnnnnnnnnnnnnnnnnnnnnnnnnnnnnnnnnnnnnnnnnnnnnnnnnnnnnnnnnnnnnnnnnnnnnnnnnnnnnnnnnnnnnnnnnnnnnnnnnnnnnnnnnnnnnnnnnnnnnnnnnnnnnnnnnnnnnnnnnnnnnnnnnnnnnnnnnnnnnnnnnnnnnnnnnnnnnnnnnnnnnnnnnnnnnnnnnnnnnnnnnnnnnnnnnnnnnnnnnnnnnnnnnnnnnnnnnnnnnnnnnnnnnnnnnnnnnnnnnnnnnnnnnnnnnnnnnnnnnnnnnnnnnnnnnnnnnnnnnnnnnnnnnnnnnnnnnnnnnnnnnnnnnnnnnnnnnnnnnnnnnnnnnnnnnnnnnnnnnnnnnnnnnnnnnnnnnnnnnnnnnnnnnnnnnnnnnnnnnnnnnnnnnnnnnnnnnnnnnnnnnnnnnnnnnnnnnnnnnnnnnnnnnnnnnnnnnnnnnnnnnnnnnnnnnnnnnnnnnnnnnnnnnnnnnnnnnnnnnnnnnnnnnnnnnnnnnnnnnnnnnnnnnnnnnnnnnnnnnnnnnnnnnnnnnnnnnnnnnnnnnnnnnnnnnnnnnnnnnnnnnnnnnnnnnnnnnnnnnnnnnnnnnnnnnnnnnnnnnnnnnnnnnnnnnnnnnnnnnnnnnnnnnnnnnnnnnnnnnnnnnnnnnnnnnnnnnnnnnnnnnnnnnnnnnnnnnnnnnnnnnnnnnnnnnnnnnnnnnnnnnnnnnnnnnnnnnnnnnnnnnnnnnnnnnnnnnnnnnnnnnnnnnnnnnnnnnnnnnnnnnnnnnnnnnnnnnnnnnnnnnnnnnnnnnnnnnnnnnnnnnnnnnnnnnnnnnnnnnnnnnnnnnnnnnnnnnnnnnnnnnnnnnnnnnnnnnnnnnnnnnnnnnnnnnnnnnnnnnnnnnnnnnnnnnnnnnnnnnnnnnnnnnnnnnnnnnnnnnnnnnnnnnnnnnnnnnnnnnnnnnnnnnnnnnnnnnnnnnnnnnnnnnnnnnnnnnnnnnnnnnnnnnnnnnnnnnnnnnnnnnnnnnnnnnnnnnnnnnnnnnnnnnnnnnnnnnnnnnnnnnnnnnnnnnnnnnnnnnnnnnnnnnnnnnnnnnnnnnnnnnnnnnnnnnnnnnnnnnnnnnnnnnnnnnnnnnnnnnnnnnnnnnnnnnnnnnnnnnnnnnnnnnnnnnnnnnnnnnnnnnnnnnnnnnnnnnnnnnnnnnnnnnnnnnnnnnnnnnnnnnnnnnnnnnnnnnnnnnnnnnnnnnnnnnnnnnnnnnnnnnnnnnnnnnnnnnnnnnnnnnnnnnnnnnnnnnnnnnnnnnnnnnnnnnnnnnnnnnnnnnnnnnnnnnnnnnnnnnnnnnnnnnnnnnnnnnnnnnnnnnnnnnnnnnnnnnnnnnnnnnnnnnnnnnnnnnnnnnnnnnnnnnnnnnnnnnnnnnnnnnnnnnnnnnnnnnnnnnnnnnnnnnnnnnnnnnnnnnnnnnnnnnnnnnnnnnnnnnnnnnnnnnnnnnnnnnnnnnnnnnnnnnnnnnnnnnnnnnnnnnnnnnnnnnnnnnnnnnnnnnnnnnnnnnnnnnnnnnnnnnnnnnnnnnnnnnnnnnnnnnnnnnnnnnnnnnnnnnnnnnnnnnnnnnnnnnnnnnnnnnnnnnnnnnnnnnnnnnnnnnnnnnnnnnnnnnnnnnnnnnnnnnnnnnnnnnnnnnnnnnnnnnnnnnnnnnnnnnnnnnnnnnnnnnnnnnnnnnnnnnnnnnnnnnnnnnnnnnnnnnnnnnnnnnnnnnnnnnnnnnnnnnnnnnnnnnnnnnnnnnnnnnnnnnnnnnnnnnnnnnnnnnnnnnnnnnnnnnnnnnnnnnnnnnnnnnnnnnnnnnnnnnnnnnnnnnnnnnnnnnnnnnnnnnnnnnnnnnnnnnnnnnnnnnnnnnnnnnnnnnnnnnnnnnnnnnnnnnnnnnnnnnnnnnnnnnnnnnnnnnnnnnnnnnnnnnnnnnnnnnnnnnnnnnnnnnnnnnnnnnnnnnnnnnnnnnnnnnnnnnnnnnnnnnnnnnnnnnnnnnnnnnnnnnnnnnnnnnnnnnnnnnnnnnnnnnnnnnnnnnnnnnnnnnnnnnnnnnnnnnnnnnnnnnnnnnnnnnnnnnnnnnnnnnnnnnnnnnnnnnnnnnnnnnnnnnnnnnnnnnnnnnnnnnnnnnnnnnnnnnnnnnnnnnnnnnnnnnnnnnnnnnnnnnnnnnnnnnnnnnnnnnnnnnnnnnnnnnnnnnnnnnnnnnnnnnnnnnnnnnnnnnnnnnnnnnnnnnnnnnnnnnnnnnnnnnnnnnnnnnnnnnnnnnnnnnnnnnnnnnnnnnnnnnnnnnnnnnnnnnnnnnnnnnnnnnnnnnnnnnnnnnnnnnnnnnnnnnnnnnnnnnnnnnnnnnnnnnnnnnnnnnnnnnnnnnnnnnnnnnnnnnnnnnnnnnnnnnnnnnnnnnnnnnnnnnnnnnnnnnnnnnnnnnnnnnnnnnnnnnnnnnnnnnnnnnnnnnnnnnnnnnnnnnnnnnnnnnnnnnnnnnnnnnnnnnnnnnnnnnnnnnnnnnnnnnnnnnnnnnnnnnnnnnnnnnnnnnnnnnnnnnnnnnnnnnnnnnnnnnnnnnnnnnnnnnnnnnnnnnnnnnnnnnnnnnnnnnnnnnnnnnnnnnnnnnnnnnnnnnnnnnnnnnnnnnnnnnnnnnnnnnnnnnnnnnnnnnnnnnnnnnnnnnnnnnnnnnnnnnnnnnnnnnnnnnnnnnnnnnnnnnnnnnnnnnnnnnnnnnnnnnnnnnnnnnnnnnnnnnnnnnnnnnnnnnnnnnnnnnnnnnnnnnnnnnnnnnnnnnnnnnnnnnnnnnnnnnnnnnnnnnnnnnnnnnnnnnnnnnnnnnnnnnnnnnnnnnnnnnnnnnnnnnnnnnnnnnnnnnnnnnnnnnnnnnnnnnnnnnnnnnnnnnnnnnnnnnnnnnnnnnnnnnnnnnnnnnnnnnnnnnnnnnnnnnnnnnnnnnnnnnnnnnnnnnnnnnnnnnnnnnnnnnnnnnnnnnnnnnnnnnnnnnnnnnnnnnnnnnnnnnnnnnnnnnnnnnnnnnnnnnnnnnnnnnnnnnnnnnnnnnnnnnnnnnnnnnnnnnnnnnnnnnnnnnnnnnnnnnnnnnnnnnnnnnnnnnnnnnnnnnnnnnnnnnnnnnnnnnnnnnnnnnnnnnnnnnnnnnnnnnnnnnnnnnnnnnnnnnnnnnnnnnnnnnnnnnnnnnnnnnnnnnnnnnnnnnnnnnnnnnnnnnnnnnnnnnnnnnnnnnnnnnnnnnnnnnnnnnnnnnnnnnnnnnnnnnnnnnnnnnnnnnnnnnnnnnnnnnnnnnnnnnnnnnnnnnnnnnnnnnnnnnnnnnnnnnnnnnnnnnnnnnnnnnnnnnnnnnnnnnnnnnnnnnnnnnnnnnnnnnnnnnnnnnnnnnnnnnnnnnnnnnnnnnnnnnnnnnnnnnnnnnnnnnnnnnnnnnnnnnnnnnnnnnnnnnnnnnnnnnnnnnnnnnnnnnnnnnnnnnnnnnnnnnnnnnnnnnnnnnnnnnnnnnnnnnnnnnnnnnnnnnnnnnnnnnnnnnnnnnnnnnnnnnnnnnnnnnnnnnnnnnnnnnnnnnnnnnnnnnnnnnnnnnnnnnnnnnnnnnnnnnnnnnnnnnnnnnnnnnnnnnnnnnnnnnnnnnnnnnnnnnnnnnnnnnnnnnnnnnnnnnnnnnnnnnnnnnnnnnnnnnnnnnnnnnnnnnnnnnnnnnnnnnnnnnnnnnnnnnnnnnnnnnnnnnnnnnnnnnnnnnnnnnnnnnnnnnnnnnnnnnnnnnnnnnnnnnnnnnnnnnnnnnnnnnnnnnnnnnnnnnnnnnnnnnnnnnnnnnnnnnnnnnnnnnnnnnnnnnnnnnnnnnnnnnnnnnnnnnnnnnnnnnnnnnnnnnnnnnnnnnnnnnnnnnnnnnnnnnnnnnnnnnnnnnnnnnnnnnnnnnnnnnnnnnnnnnnnnnnnnnnnnnnnnnnnnnnnnnnnnnnnnnnnnnnnnnnnnnnnnnnnnnnnnnnnnnnnnnnnnnnnnnnnnnnnnnnnnnnnnnnnnnnnnnnnnnnnnnnnnnnnnnnnnnnnnnnnnnnnnnnnnnnnnnnnnnnnnnnnnnnnnnnnnnnnnnnnnnnnnnnnnnnnnnnnnnnnnnnnnnnnnnnnnnnnnnnnnnnnnnnnnnnnnnnnnnnnnnnnnnnnnnnnnnnnnnnnnnnnnnnnnnnnnnnnnnnnnnnnnnnnnnnnnnnnnnnnnnnnnnnnnnnnnnnnnnnnnnnnnnnnnnnnnnnnnnnnnnnnnnnnnnnnnnnnnnnnnnnnnnnnnnnnnnnnnnnnnnnnnnnnnnnnnnnnnnnnnnnnnnnnnnnnnnnnnnnnnnnnnnnnnnnnnnnnnnnnnnnnnnnnnnnnnnnnnnnnnnnnnnnnnnnnnnnnnnnnnnnnnnnnnnnnnnnnnnnnnnnnnnnnnnnnnnnnnnnnnnnnnnnnnnnnnnnnnnnnnnnnnnnnnnnnnnnnnnnnnnnnnnnnnnnnnnnnnnnnnnnnnnnnnnnnnnnnnnnnnnnnnnnnnnnnnnnnnnnnnnnnnnnnnnnnnnnnnnnnnnnnnnnnnnnnnnnnnnnnnnnnnnnnnnnnnnnnnnnnnnnnnnnnnnnnnnnnnnnnnnnnnnnnnnnnnnnnnnnnnnnnnnnnnnnnnnnnnnnnnnnnnnnnnnnnnnnnnnnnnnnnnnnnnnnnnnnnnnnnnnnnnnnnnnnnnnnnnnnnnnnnnnnnnnnnnnnnnnnnnnnnnnnnnnnnnnnnnnnnnnnnnnnnnnnnnnnnnnnnnnnnnnnnnnnnnnnnnnnnnnnnnnnnnnnnnnnnnnnnnnnnnnnnnnnnnnnnnnnnnnnnnnnnnnnnnnnnnnnnnnnnnnnnnnnnnnnnnnnnnnnnnnnnnnnnnnnnnnnnnnnnnnnnnnnnnnnnnnnnnnnnnnnnnnnnnnnnnnnnnnnnnnnnnnnnnnnnnnnnnnnnnnnnnnnnnnnnnnnnnnnnnnnnnnnnnnnnnnnnnnnnnnnnnnnnnnnnnnnnnnnnnnnnnnnnnnnnnnnnnnnnnnnnnnnnnnnnnnnnnnnnnnnnnnnnnnnnnnnnnnnnnnnnnnnnnnnnnnnnnnnnnnnnnnnnnnnnnnnnnnnnnnnnnnnnnnnnnnnnnnnnnnnnnnnnnnnnnnnnnnnnnnnnnnnnnnnnnnnnnnnnnnnnnnnnnnnnnnnnnnnnnnnnnnnnnnnnnnnnnnnnnnnnnnnnnnnnnnnnnnnnnnnnnnnnnnnnnnnnnnnnnnnnnnnnnnnnnnnnnnnnnnnnnnnnnnnnnnnnnnnnnnnnnnnnnnnnnnnnnnnnnnnnnnnnnnnnnnnnnnnnnnnnnnnnnnnnnnnnnnnnnnnnnnnnnnnnnnnnnnnnnnnnnnnnnnnnnnnnnnnnnnnnnnnnnnnnnnnnnnnnnnnnnnnnnnnnnnnnnnnnnnnnnnnnnnnnnnnnnnnnnnnnnnnnnnnnnnnnnnnnnnnnnnnnnnnnnnnnnnnnnnnnnnnnnnnnnnnnnnnnnnnnnnnnnnnnnnnnnnnnnnnnnnnnnnnnnnnnnnnnnnnnnnnnnnnnnnnnnnnnnnnnnnnnnnnnnnnnnnnnnnnnnnnnnnnnnnnnnnnnnnnnnnnnnnnnnnnnnnnnnnnnnnnnnnnnnnnnnnnnnnnnnnnnnnnnnnnnnnnnnnnnnnnnnnnnnnnnnnnnnnnnnnnnnnnnnnnnnnnnnnnnnnnnnnnnnnnnnnnnnnnnnnnnnnnnnnnnnnnnnnnnnnnnnnnnnnnnnnnnnnnnnnnnnnnnnnnnnnnnnnnnnnnnnnnnnnnnnnnnnnnnnnnnnnnnnnnnnnnnnnnnnnnnnnnnnnnnnnnnnnnnnnnnnnnnnnnnnnnnnnnnnnnnnnnnnnnnnnnnnnnnnnnnnnnnnnnnnnnnnnnnnnnnnnnnnnnnnnnnnnnnnnnnnnnnnnnnnnnnnnnnnnnnnnnnnnnnnnnnnnnnnnnnnnnnnnnnnnnnnnnnnnnnnnnnnnnnnnnnnnnnnnnnnnnnnnnnnnnnnnnnnnnnnnnnnnnnnnnnnnnnnnnnnnnnnnnnnnnnnnnnnnnnnnnnnnnnnnnnnnnnnnnnnnnnnnnnnnnnnnnnnnnnnnnnnnnnnnnnnnnnnnnnnnnnnnnnnnnnnnnnnnnnnnnnnnnnnnnnnnnnnnnnnnnnnnnnnnnnnnnnnnnnnnnnnnnnnnnnnnnnnnnnnnnnnnnnnnnnnnnnnnnnnnnnnnnnnnnnnnnnnnnnnnnnnnnnnnnnnnnnnnnnnnnnnnnnnnnnnnnnnnnnnnnnnnnnnnnnnnnnnnnnnnnnnnnnnnnnnnnnnnnnnnnnnnnnnnnnnnnnnnnnnnnnnnnnnnnnnnnnnnnnnnnnnnnnnnnnnnnnnnnnnnnnnnnnnnnnnnnnnnnnnnnnnnnnnnnnnnnnnnnnnnnnnnnnnnnnnnnnnnnnnnnnnnnnnnnnnnnnnnnnnnnnnnnnnnnnnnnnnnnnnnnnnnnnnnnnnnnnnnnnnnnnnnnnnnnnnnnnnnnnnnnnnnnnnnnnnnnnnnnnnnnnnnnnnnnnnnnnnnnnnnnnnnnnnnnnnnnnnnnnnnnnnnnnnnnnnnnnnnnnnnnnnnnnnnnnnnnnnnnnnnnnnnnnnnnnnnnnnnnnnnnnnnnnnnnnnnnnnnnnnnnnnnnnnnnnnnnnnnnnnnnnnnnnnnnnnnnnnnnnnnnnnnnnnnnnnnnnnnnnnnnnnnnnnnnnnnnnnnnnnnnnnnnnnnnnnnnnnnnnnnnnnnnnnnnnnnnnnnnnnnnnnnnnnnnnnnnnnnnnnnnnnnnnnnnnnnnnnnnnnnnnnnnnnnnnnnnnnnnnnnnnnnnnnnnnnnnnnnnnnnnnnnnnnnnnnnnnnnnnnnnnnnnnnnnnnnnnnnnnnnnnnnnnnnnnnnnnnnnnnnnnnnnnnnnnnnnnnnnnnnnnnnnnnnnnnnnnnnnnnnnnnnnnnnnnnnnnnnnnnnnnnnnnnnnnnnnnnnnnnnnnnnnnnnnnnnnnnnnnnnnnnnnnnnnnnnnnnnnnnnnnnnnnnnnnnnnnnnnnnnnnnnnnnnnnnnnnnnnnnnnnnnnnnnnnnnnnnnnnnnnnnnnnnnnnnnnnnnnnnnnnnnnnnnnnnnnnnnnnnnnnnnnnnnnnnnnnnnnnnnnnnnnnnnnnnnnnnnnnnnnnnnnnnnnnnnnnnnnnnnnnnnnnnnnnnnnnnnnnnnnnnnnnnnnnnnnnnnnnnnnnnnnnnnnnnnnnnnnnnnnnnnnnnnnnnnnnnnnnnnnnnnnnnnnnnnnnnnnnnnnnnnnnnnnnnnnnnnnnnnnnnnnnnnnnnnnnnnnnnnnnnnnnnnnnnnnnnnnnnnnnnnnnnnnnnnnnnnnnnnnnnnnnnnnnnnnnnnnnnnnnnnnnnnnnnnnnnnnnnnnnnnnnnnnnnnnnnnnnnnnnnnnnnnnnnnnnnnnnnnnnnnnnnnnnnnnnnnnnnnnnnnnnnnnnnnnnnnnnnnnnnnnnnnnnnnnnnnnnnnnnnnnnnnnnnnnnnnnnnnnnnnnnnnnnnnnnnnnnnnnnnnnnnnnnnnnnnnnnnnnnnnnnnnnnnnnnnnnnnnnnnnnnnnnnnnnnnnnnnnnnnnnnnnnnnnnnnnnnnnnnnnnnnnnnnnnnnnnnnnnnnnnnnnnnnnnnnnnnnnnnnnnnnnnnnnnnnnnnnnnnnnnnnnnnnnnnnnnnnnnnnnnnnnnnnnnnnnnnnnnnnnnnnnnnnnnnnnnnnnnnnnnnnnnnnnnnnnnnnnnnnnnnnnnnnnnnnnnnnnnnnnnnnnnnnnnnnnnnnnnnnnnnnnnnnnnnnnnnnnnnnnnnnnnnnnnnnnnnnnnnnnnnnnnnnnnnnnnnnnnnnnnnnnnnnnnnnnnnnnnnnnnnnnnnnnnnnnnnnnnnnnnnnnnnnnnnnnnnnnnnnnnnnnnnnnnnnnnnnnnnnnnnnnnnnnnnnnnnnnnnnnnnnnnnnnnnnnnnnnnnnnnnnnnnnnnnnnnnnnnnnnnnnnnnnnnnnnnnnnnnnnnnnnnnnnnnnnnnnnnnnnnnnnnnnnnnnnnnnnnnnnnnnnnnnnnnnnnnnnnnnnnnnnnnnnnnnnnnnnnnnnnnnnnnnnnnnnnnnnnnnnnnnnnnnnnnnnnnnnnnnnnnnnnnnnnnnnnnnnnnnnnnnnnnnnnnnnnnnnnnnnnnnnnnnnnnnnnnnnnnnnnnnnnnnnnnnnnnnnnnnnnnnnnnnnnnnnnnnnnnnnnnnnnnnnnnnnnnnnnnnnnnnnnnnnnnnnnnnnnnnnnnnnnnnnnnnnnnnnnnnnnnnnnnnnnnnnnnnnnnnnnnnnnnnnnnnnnnnnnnnnnnnnnnnnnnnnnnnnnnnnnnnnnnnnnnnnnnnnnnnnnnnnnnnnnnnnnnnnnnnnnnnnnnnnnnnnnnnnnnnnnnnnnnnnnnnnnnnnnnnnnnnnnnnnnnnnnnnnnnnnnnnnnnnnnnnnnnnnnnnnnnnnnnnnnnnnnnnnnnnnnnnnnnnnnnnnnnnnnnnnnnnnnnnnnnnnnnnnnnnnnnnnnnnnnnnnnnnnnnnnnnnnnnnnnnnnnnnnnnnnnnnnnnnnnnnnnnnnnnnnnnnnnnnnnnnnnnnnnnnnnnnnnnnnnnnnnnnnnnnnnnnnnnnnnnnnnnnnnnnnnnnnnnnnnnnnnnnnnnnnnnnnnnnnnnnnnnnnnnnnnnnnnnnnnnnnnnnnnnnnnnnnnnnnnnnnnnnnnnnnnnnnnnnnnnnnnnnnnnnnnnnnnnnnnnnnnnnnnnnnnnnnnnnnnnnnnnnnnnnnnnnnnnnnnnnnnnnnnnnnnnnnnnnnnnnnnnnnnnnnnnnnnnnnnnnnnnnnnnnnnnnnnnnnnnnnnnnnnnnnnnnnnnnnnnnnnnnnnnnnnnnnnnnnnnnnnnnnnnnnnnnnnnnnnnnnnnnnnnnnnnnnnnnnnnnnnnnnnnnnnnnnnnnnnnnnnnnnnnnnnnnnnnnnnnnnnnnnnnnnnnnnnnnnnnnnnnnnnnnnnnnnnnnnnnnnnnnnnnnnnnnnnnnnnnnnnnnnnnnnnnnnnnnnnnnnnnnnnnnnnnnnnnnnnnnnnnnnnnnnnnnnnnnnnnnnnnnnnnnnnnnnnnnnnnnnnnnnnnnnnnnnnnnnnnnnnnnnnnnnnnnnnnnnnnnnnnnnnnnnnnnnnnnnnnnnnnnnnnnnnnnnnnnnnnnnnnnnnnnnnnnnnnnnnnnnnnnnnnnnnnnnnnnnnnnnnnnnnnnnnnnnnnnnnnnnnnnnnnnnnnnnnnnnnnnnnnnnnnnnnnnnnnnnnnnnnnnnnnnnnnnnnnnnnnnnnnnnnnnnnnnnnnnnnnnnnnnnnnnnnnnnnnnnnnnnnnnnnnnnnnnnnnnnnnnnnnnnnnnnnnnnnnnnnnnnnnnnnnnnnnnnnnnnnnnnnnnnnnnnnnnnnnnnnnnnnnnnnnnnnnnnnnnnnnnnnnnnnnnnnnnnnnnnnnnnnnnnnnnnnnnnnnnnnnnnnnnnnnnnnnnnnnnnnnnnnnnnnnnnnnnnnnnnnnnnnnnnnnnnnnnnnnnnnnnnnnnnnnnnnnnnnnnnnnnnnnnnnnnnnnnnnnnnnnnnnnnnnnnnnnnnnnnnnnnnnnnnnnnnnnnnnnnnnnnnnnnnnnnnnnnnnnnnnnnnnnnnnnnnnnnnnnnnnnnnnnnnnnnnnnnnnnnnnnnnnnnnnnnnnnnnnnnnnnnnnnnnnnnnnnnnnnnnnnnnnnnnnnnnnnnnnnnnnnnnnnnnnnnnnnnnnnnnnnnnnnnnnnnnnnnnnnnnnnnnnnnnnnnnnnnnnnnnnnnnnnnnnnnnnnnnnnnnnnnnnnnnnnnnnnnnnnnnnnnnnnnnnnnnnnnnnnnnnnnnnnnnnnnnnnnnnnnnnnnnnnnnnnnnnnnnnnnnnnnnnnnnnnnnnnnnnnnnnnnnnnnnnnnnnnnnnnnnnnnnnnnnnnnnnnnnnnnnnnnnnnnnnnnnnnnnnnnnnnnnnnnnnnnnnnnnnnnnnnnnnnnnnnnnnnnnnnnnnnnnnnnnnnnnnnnnnnnnnnnnnnnnnnnnnnnnnnnnnnnnnnnnnnnnnnnnnnnnnnnnnnnnnnnnnnnnnnnnnnnnnnnnnnnnnnnnnnnnnnnnnnnnnnnnnnnnnnnnnnnnnnnnnnnnnnnnnnnnnnnnnnnnnnnnnnnnnnnnnnnnnnnnnnnnnnnnnnnnnnnnnnnnnnnnnnnnnnnnnnnnnnnnnnnnnnnnnnnnnnnnnnnnnnnnnnnnnnnnnnnnnnnnnnnnnnnnnnnnnnnnnnnnnnnnnnnnnnnnnnnnnnnnnnnnnnnnnnnnnnnnnnnnnnnnnnnnnnnnnnnnnnnnnnnnnnnnnnnnnnnnnnnnnnnnnnnnnnnnnnnnnnnnnnnnnnnnnnnnnnnnnnnnnnnnnnnnnnnnnnnnnnnnnnnnnnnnnnnnnnnnnnnnnnnnnnnnnnnnnnnnnnnnnnnnnnnnnnnnnnnnnnnnnnnnnnnnnnnnnnnnnnnnnnnnnnnnnnnnnnnnnnnnnnnnnnnnnnnnnnnnnnnnnnnnnnnnnnnnnnnnnnnnnnnnnnnnnnnnnnnnnnnnnnnnnnnnnnnnnnnnnnnnnnnnnnnnnnnnnnnnnnnnnnnnnnnnnnnnnnnnnnnnnnnnnnnnnnnnnnnnnnnnnnnnnnnnnnnnnnnnnnnnnnnnnnnnnnnnnnnnnnnnnnnnnnnnnnnnnnnnnnnnnnnnnnnnnnnnnnnnnnnnnnnnnnnnnnnnnnnnnnnnnnnnnnnnnnnnnnnnnnnnnnnnnnnnnnnnnnnnnnnnnnnnnnnnnnnnnnnnnnnnnnnnnnnnnnnnnnnnnnnnnnnnnnnnnnnnnnnnnnnnnnnnnnnnnnnnnnnnnnnnnnnnnnnnnnnnnnnnnnnnnnnnnnnnnnnnnnnnnnnnnnnnnnnnnnnnnnnnnnnnnnnnnnnnnnnnnnnnnnnnnnnnnnnnnnnnnnnnnnnnnnnnnnnnnnnnnnnnnnnnnnnnnnnnnnnnnnnnnnnnnnnnnnnnnnnnnnnnnnnnnnnnnnnnnnnnnnnnnnnnnnnnnnnnnnnnnnnnnnnnnnnnnnnnnnnnnnnnnnnnnnnnnnnnnnnnnnnnnnnnnnnnnnnnnnnnnnnnnnnnnnnnnnnnnnnnnnnnnnnnnnnnnnnnnnnnnnnnnnnnnnnnnnnnnnnnnnnnnnnnnnnnnnnnnnnnnnnnnnnnnnnnnnnnnnnnnnnnnnnnnnnnnnnnnnnnnnnnnnnnnnnnnnnnnnnnnnnnnnnnnnnnnnnnnnnnnnnnnnnnnnnnnnnnnnnnnnnnnnnnnnnnnnnnnnnnnnnnnnnnnnnnnnnnnnnnnnnnnnnnnnnnnnnnnnnnnnnnnnnnnnnnnnnnnnnnnnnnnnnnnnnnnnnnnnnnnnnnnnnnnnnnnnnnnnnnnnnnnnnnnnnnnnnnnnnnnnnnnnnnnnnnnnnnnnnnnnnnnnnnnnnnnnnnnnnnnnnnnnnnnnnnnnnnnnnnnnnnnnnnnnnnnnnnnnnnnnnnnnnnnnnnnnnnnnnnnnnnnnnnnnnnnnnnnnnnnnnnnnnnnnnnnnnnnnnnnnnnnnnnnnnnnnnnnnnnnnnnnnnnnnnnnnnnnnnnnnnnnnnnnnnnnnnnnnnnnnnnnnnnnnnnnnnnnnnnnnnnnnnnnnnnnnnnnnnnnnnnnnnnnnnnnnnnnnnnnnnnnnnnnnnnnnnnnnnnnnnnnnnnnnnnnnnnnnnnnnnnnnnnnnnnnnnnnnnnnnnnnnnnnnnnnnnnnnnnnnnnnnnnnnnnnnnnnnnnnnnnnnnnnnnnnnnnnnnnnnnnnnnnnnnnnnnnnnnnnnnnnnnnnnnnnnnnnnnnnnnnnnnnnnnnnnnnnnnnnnnnnnnnnnnnnnnnnnnnnnnnnnnnnnnnnnnnnnnnnnnnnnnnnnnnnnnnnnnnnnnnnnnnnnnnnnnnnnnnnnnnnnnnnnnnnnnnnnnnnnnnnnnnnnnnnnnnnnnnnnnnnnnnnnnnnnnnnnnnnnnnnnnnnnnnnnnnnnnnnnnnnnnnnnnnnnnnnnnnnnnnnnnnnnnnnnnnnnnnnnnnnnnnnnnnnnnnnnnnnnnnnnnnnnnnnnnnnnnnnnnnnnnnnnnnnnnnnnnnnnnnnnnnnnnnnnnnnnnnnnnnnnnnnnnnnnnnnnnnnnnnnnnnnnnnnnnnnnnnnnnnnnnnnnnnnnnnnnnnnnnnnnnnnnnnnnnnnnnnnnnnnnnnnnnnnnnnnnnnnnnnnnnnnnnnnnnnnnnnnnnnnnnnnnnnnnnnnnnnnnnnnnnnnnnnnnnnnnnnnnnnnnnnnnnnnnnnnnnnnnnnnnnnnnnnnnnnnnnnnnnnnnnnnnnnnnnnnnnnnnnnnnnnnnnnnnnnnnnnnnnnnnnnnnnnnnnnnnnnnnnnnnnnnnnnnnnnnnnnnnnnnnnnnnnnnnnnnnnnnnnnnnnnnnnnnnnnnnnnnnnnnnnnnnnnnnnnnnnnnnnnnnnnnnnnnnnnnnnnnnnnnnnnnnnnnnnnnnnnnnnnnnnnnnnnnnnnnnnnnnnnnnnnnnnnnnnnnnnnnnnnnnnnnnnnnnnnnnnnnnnnnnnnnnnnnnnnnnnnnnnnnnnnnnnnnnnnnnnnnnnnnnnnnnnnnnnnnnnnnnnnnnnnnnnnnnnnnnnnnnnnnnnnnnnnnnnnnnnnnnnnnnnnnnnnnnnnnnnnnnnnnnnnnnnnnnnnnnnnnnnnnnnnnnnnnnnnnnnnnnnnnnnnnnnnnnnnnnnnnnnnnnnnnnnnnnnnnnnnnnnnnnnnnnnnnnnnnnnnnnnnnnnnnnnnnnnnnnnnnnnnnnnnnnnnnnnnnnnnnnnnnnnnnnnnnnnnnnnnnnnnnnnnnnnnnnnnnnnnnnnnnnnnnnnnnnnnnnnnnnnnnnnnnnnnnnnnnnnnnnnnnnnnnnnnnnnnnnnnnnnnnnnnnnnnnnnnnnnnnnnnnnnnnnnnnnnnnnnnnnnnnnnnnnnnnnnnnnnnnnnnnnnnnnnnnnnnnnnnnnnnnnnnnnnnnnnnnnnnnnnnnnnnnnnnnnnnnnnnnnnnnnnnnnnnnnnnnnnnnnnnnnnnnnnnnnnnnnnnnnnnnnnnnnnnnnnnnnnnnnnnnnnnnnnnnnnnnnnnnnnnnnnnnnnnnnnnnnnnnnnnnnnnnnnnnnnnnnnnnnnnnnnnnnnnnnnnnnnnnnnnnnnnnnnnnnnnnnnnnnnnnnnnnnnnnnnnnnnnnnnnnnnnnnnnnnnnnnnnnnnnnnnnnnnnnnnnnnnnnnnnnnnnnnnnnnnnnnnnnnnnnnnnnnnnnnnnnnnnnnnnnnnnnnnnnnnnnnnnnnnnnnnnnnnnnnnnnnnnnnnnnnnnnnnnnnnnnnnnnnnnnnnnnnnnnnnnnnnnnnnnnnnnnnnnnnnnnnnnnnnnnnnnnnnnnnnnnnnnnnnnnnnnnnnnnnnnnnnnnnnnnnnnnnnnnnnnnnnnnnnnnnnnnnnnnnnnnnnnnnnnnnnnnnnnnnnnnnnnnnnnnnnnnnnnnnnnnnnnnnnnnnnnnnnnnnnnnnnnnnnnnnnnnnnnnnnnnnnnnnnnnnnnnnnnnnnnnnnnnnnnnnnnnnnnnnnnnnnnnnnnnnnnnnnnnnnnnnnnnnnnnnnnnnnnnnnnnnnnnnnnnnnnnnnnnnnnnnnnnnnnnnnnnnnnnnnnnnnnnnnnnnnnnnnnnnnnnnnnnnnnnnnnnnnnnnnnnnnnnnnnnnnnnnnnnnnnnnnnnnnnnnnnnnnnnnnnnnnnnnnnnnnnnnnnnnnnnnnnnnnnnnnnnnnnnnnnnnnnnnnnnnnnnnnnnnnnnnnnnnnnnnnnnnnnnnnnnnnnnnnnnnnnnnnnnnnnnnnnnnnnnnnnnnnnnnnnnnnnnnnnnnnnnnnnnnnnnnnnnnnnnnnnnnnnnnnnnnnnnnnnnnnnnnnnnnnnnnnnnnnnnnnnnnnnnnnnnnnnnnnnnnnnnnnnnnnnnnnnnnnnnnnnnnnnnnnnnnnnnnnnnnnnnnnnnnnnnnnnnnnnnnnnnnnnnnnnnnnnnnnnnnnnnnnnnnnnnnnnnnnnnnnnnnnnnnnnnnnnnnnnnnnnnnnnnnnnnnnnnnnnnnnnnnnnnnnnnnnnnnnnnnnnnnnnnnnnnnnnnnnnnnnnnnnnnnnnnnnnnnnnnnnnnnnnnnnnnnnnnnnnnnnnnnnnnnnnnnnnnnnnnnnnnnnnnnnnnnnnnnnnnnnnnnnnnnnnnnnnnnnnnnnnnnnnnnnnnnnnnnnnnnnnnnnnnnnnnnnnnnnnnnnnnnnnnnnnnnnnnnnnnnnnnnnnnnnnnnnnnnnnnnnnnnnnnnnnnnnnnnnnnnnnnnnnnnnnnnnnnnnnnnnnnnnnnnnnnnnnnnnnnnnnnnnnnnnnnnnnnnnnnnnnnnnnnnnnnnnnnnnnnnnnnnnnnnnnnnnnnnnnnnnnnnnnnnnnnnnnnnnnnnnnnnnnnnnnnnnnnnnnnnnnnnnnnnnnnnnnnnnnnnnnnnnnnnnnnnnnnnnnnnnnnnnnnnnnnnnnnnnnnnnnnnnnnnnnnnnnnnnnnnnnnnnnnnnnnnnnnnnnnnnnnnnnnnnnnnnnnnnnnnnnnnnnnnnnnnnnnnnnnnnnnnnnnnnnnnnnnnnnnnnnnnnnnnnnnnnnnnnnnnnnnnnnnnnnnnnnnnnnnnnnnnnnnnnnnnnnnnnnnnnnnnnnnnnnnnnnnnnnnnnnnnnnnnnnnnnnnnnnnnnnnnnnnnnnnnnnnnnnnnnnnnnnnnnnnnnnnnnnnnnnnnnnnnnnnnnnnnnnnnnnnnnnnnnnnnnnnnnnnnnnnnnnnnnnnnnnnnnnnnnnnnnnnnnnnnnnnnnnnnnnnnnnnnnnnnnnnnnnnnnnnnnnnnnnnnnnnnnnnnnnnnnnnnnnnnnnnnnnnnnnnnnnnnnnnnnnnnnnnnnnnnnnnnnnnnnnnnnnnnnnnnnnnnnnnnnnnnnnnnnnnnnnnnnnnnnnnnnnnnnnnnnnnnnnnnnnnnnnnnnnnnnnnnnnnnnnnnnnnnnnnnnnnnnnnnnnnnnnnnnnnnnnnnnnnnnnnnnnnnnnnnnnnnnnnnnnnnnnnnnnnnnnnnnnnnnnnnnnnnnnnnnnnnnnnnnnnnnnnnnnnnnnnnnnnnnnnnnnnnnnnnnnnnnnnnnnnnnnnnnnnnnnnnnnnnnnnnnnnnnnnnnnnnnnnnnnnnnnnnnnnnnnnnnnnnnnnnnnnnnnnnnnnnnnnnnnnnnnnnnnnnnnnnnnnnnnnnnnnnnnnnnnnnnnnnnnnnnnnnnnnnnnnnnnnnnnnnnnnnnnnnnnnnnnnnnnnnnnnnnnnnnnnnnnnnnnnnnnnnnnnnnnnnnnnnnnnnnnnnnnnnnnnnnnnnnnnnnnnnnnnnnnnnnnnnnnnnnnnnnnnnnnnnnnnnnnnnnnnnnnnnnnnnnnnnnnnnnnnnnnnnnnnnnnnnnnnnnnnnnnnnnnnnnnnnnnnnnnnnnnnnnnnnnnnnnnnnnnnnnnnnnnnnnnnnnnnnnnnnnnnnnnnnnnnnnnnnnnnnnnnnnnnnnnnnnnnnnnnnnnnnnnnnnnnnnnnnnnnnnnnnnnnnnnnnnnnnnnnnnnnnnnnnnnnnnnnnnnnnnnnnnnnnnnnnnnnnnnnnnnnnnnnnnnnnnnnnnnnnnnnnnnnnnnnnnnnnnnnnnnnnnnnnnnnnnnnnnnnnnnnnnnnnnnnnnnnnnnnnnnnnnnnnnnnnnnnnnnnnnnnnnnnnnnnnnnnnnnnnnnnnnnnnnnnnnnnnnnnnnnnnnnnnnnnnnnnnnnnnnnnnnnnnnnnnnnnnnnnnnnnnnnnnnnnnnnnnnnnnnnnnnnnnnnnnnnnnnnnnnnnnnnnnnnnnnnnnnnnnnnnnnnnnnnnnnnnnnnnnnnnnnnnnnnnnnnnnnnnnnnnnnnnnnnnnnnnnnnnnnnnnnnnnnnnnnnnnnnnnnnnnnnnnnnnnnnnnnnnnnnnnnnnnnnnnnnnnnnnnnnnnnnnnnnnnnnnnnnnnnnnnnnnnnnnnnnnnnnnnnnnnnnnnnnnnnnnnnnnnnnnnnnnnnnnnnnnnnnnnnnnnnnnnnnnnnnnnnnnnnnnnnnnnnnnnnnnnnnnnnnnnnnnnnnnnnnnnnnnnnnnnnnnnnnnnnnnnnnnnnnnnnnnnnnnnnnnnnnnnnnnnnnnnnnnnnnnnnnnnnnnnnnnnnnnnnnnnnnnnnnnnnnnnnnnnnnnnnnnnnnnnnnnnnnnnnnnnnnnnnnnnnnnnnnnnnnnnnnnnnnnnnnnnnnnnnnnnnnnnnnnnnnnnnnnnnnnnnnnnnnnnnnnnnnnnnnnnnnnnnnnnnnnnnnnnnnnnnnnnnnnnnnnnnnnnnnnnnnnnnnnnnnnnnnnnnnnnnnnnnnnnnnnnnnnnnnnnnnnnnnnnnnnnnnnnnnnnnnnnnnnnnnnnnnnnnnnnnnnnnnnnnnnnnnnnnnnnnnnnnnnnnnnnnnnnnnnnnnnnnnnnnnnnnnnnnnnnnnnnnnnnnnnnnnnnnnnnnnnnnnnnnnnnnnnnnnnnnnnnnnnnnnnnnnnnnnnnnnnnnnnnnnnnnnnnnnnnnnnnnnnnnnnnnnnnnnnnnnnnnnnnnnnnnnnnnnnnnnnnnnnnnnnnnnnnnnnnnnnnnnnnnnnnnnnnnnnnnnnnnnnnnnnnnnnnnnnnnnnnnnnnnnnnnnnnnnnnnnnnnnnnnnnnnnnnnnnnnnnnnnnnnnnnnnnnnnnnnnnnnnnnnnnnnnnnnnnnnnnnnnnnnnnnnnnnnnnnnnnnnnnnnnnnnnnnnnnnnnnnnnnnnnnnnnnnnnnnnnnnnnnnnnnnnnnnnnnnnnnnnnnnnnnnnnnnnnnnnnnnnnnnnnnnnnnnnnnnnnnnnnnnnnnnnnnnnnnnnnnnnnnnnnnnnnnnnnnnnnnnnnnnnnnnnnnnnnnnnnnnnnnnnnnnnnnnnnnnnnnnnnnnnnnnnnnnnnnnnnnnnnnnnnnnnnnnnnnnnnnnnnnnnnnnnnnnnnnnnnnnnnnnnnnnnnnnnnnnnnnnnnnnnnnnnnnnnnnnnnnnnnnnnnnnnnnnnnnnnnnnnnnnnnnnnnnnnnnnnnnnnnnnnnnnnnnnnnnnnnnnnnnnnnnnnnnnnnnnnnnnnnnnnnnnnnnnnnnnnnnnnnnnnnnnnnnnnnnnnnnnnnnnnnnnnnnnnnnnnnnnnnnnnnnnnnnnnnnnnnnnnnnnnnnnnnnnnnnnnnnnnnnnnnnnnnnnnnnnnnnnnnnnnnnnnnnnnnnnnnnnnnnnnnnnnnnnnnnnnnnnnnnnnnnnnnnnnnnnnnnnnnnnnnnnnnnnnnnnnnnnnnnnnnnnnnnnnnnnnnnnnnnnnnnnnnnnnnnnnnnnnnnnnnnnnnnnnnnnnnnnnnnnnnnnnnnnnnnnnnnnnnnnnnnnnnnnnnnnnnnnnnnnnnnnnnnnnnnnnnnnnnnnnnnnnnnnnnnnnnnnnnnnnnnnnnnnnnnnnnnnnnnnnnnnnnnnnnnnnnnnnnnnnnnnnnnnnnnnnnnnnnnnnnnnnnnnnnnnnnnnnnnnnnnnnnnnnnnnnnnnnnnnnnnnnnnnnnnnnnnnnnnnnnnnnnnnnnnnnnnnnnnnnnnnnnnnnnnnnnnnnnnnnnnnnnnnnnnnnnnnnnnnnnnnnnnnnnnnnnnnnnnnnnnnnnnnnnnnnnnnnnnnnnnnnnnnnnnnnnnnnnnnnnnnnnnnnnnnnnnnnnnnnnnnnnnnnnnnnnnnnnnnnnnnnnnnnnnnnnnnnnnnnnnnnnnnnnnnnnnnnnnnnnnnnnnnnnnnnnnnnnnnnnnnnnnnnnnnnnnnnnnnnnnnnnnnnnnnnnnnnnnnnnnnnnnnnnnnnnnnnnnnnnnnnnnnnnnnnnnnnnnnnnnnnnnnnnnnnnnnnnnnnnnnnnnnnnnnnnnnnnnnnnnnnnnnnnnnnnnnnnnnnnnnnnnnnnnnnnnnnnnnnnnnnnnnnnnnnnnnnnnnnnnnnnnnnnnnnnnnnnnnnnnnnnnnnnnnnnnnnnnnnnnnnnnnnnnnnnnnnnnnnnnnnnnnnnnnnnnnnnnnnnnnnnnnnnnnnnnnnnnnnnnnnnnnnnnnnnnnnnnnnnnnnnnnnnnnnnnnnnnnnnnnnnnnnnnnnnnnnnnnnnnnnnnnnnnnnnnnnnnnnnnnnnnnnnnnnnnnnnnnnnnnnnnnnnnnnnnnnnnnnnnnnnnnnnnnnnnnnnnnnnnnnnnnnnnnnnnnnnnnnnnnnnnnnnnnnnnnnnnnnnnnnnnnnnnnnnnnnnnnnnnnnnnnnnnnnnnnnnnnnnnnnnnnnnnnnnnnnnnnnnnnnnnnnnnnnnnnnnnnnnnnnnnnnnnnnnnnnnnnnnnnnnnnnnnnnnnnnnnnnnnnnnnnnnnnnnnnnnnnnnnnnnnnnnnnnnnnnnnnnnnnnnnnnnnnnnnnnnnnnnnnnnnnnnnnnnnnnnnnnnnnnnnnnnnnnnnnnnnnnnnnnnnnnnnnnnnnnnnnnnnnnnnnnnnnnnnnnnnnnnnnnnnnnnnnnnnnnnnnnnnnnnnnnnnnnnnnnnnnnnnnnnnnnnnnnnnnnnnnnnnnnnnnnnnnnnnnnnnnnnnnnnnnnnnnnnnnnnnnnnnnnnnnnnnnnnnnnnnnnnnnnnnnnnnnnnnnnnnnnnnnnnnnnnnnnnnnnnnnnnnnnnnnnnnnnnnnnnnnnnnnnnnnnnnnnnnnnnnnnnnnnnnnnnnnnnnnnnnnnnnnnnnnnnnnnnnnnnnnnnnnnnnnnnnnnnnnnnnnnnnnnnnnnnnnnnnnnnnnnnnnnnnnnnnnnnnnnnnnnnnnnnnnnnnnnnnnnnnnnnnnnnnnnnnnnnnnnnnnnnnnnnnnnnnnnnnnnnnnnnnnnnnnnnnnnnnnnnnnnnnnnnnnnnnnnnnnnnnnnnnnnnnnnnnnnnnnnnnnnnnnnnnnnnnnnnnnnnnnnnnnnnnnnnnnnnnnnnnnnnnnnnnnnnnnnnnnnnnnnnnnnnnnnnnnnnnnnnnnnnnnnnnnnnnnnnnnnnnnnnnnnnnnnnnnnnnnnnnnnnnnnnnnnnnnnnnnnnnnnnnnnnnnnnnnnnnnnnnnnnnnnnnnnnnnnnnnnnnnnnnnnnnnnnnnnnnnnnnnnnnnnnnnnnnnnnnnnnnnnnnnnnnnnnnnnnnnnnnnnnnnnnnnnnnnnnnnnnnnnnnnnnnnnnnnnnnnnnnnnnnnnnnnnnnnnnnnnnnnnnnnnnnnnnnnnnnnnnnnnnnnnnnnnnnnnnnnnnnnnnnnnnnnnnnnnnnnnnnnnnnnnnnnnnnnnnnnnnnnnnnnnnnnnnnnnnnnnnnnnnnnnnnnnnnnnnnnnnnnnnnnnnnnnnnnnnnnnnnnnnnnnnnnnnnnnnnnnnnnnnnnnnnnnnnnnnnnnnnnnnnnnnnnnnnnnnnnnnnnnnnnnnnnnnnnnnnnnnnnnnnnnnnnnnnnnnnnnnnnnnnnnnnnnnnnnnnnnnnnnnnnnnnnnnnnnnnnnnnnnnnnnnnnnnnnnnnnnnnnnnnnnnnnnnnnnnnnnnnnnnnnnnnnnnnnnnnnnnnnnnnnnnnnnnnnnnnnnnnnnnnnnnnnnnnnnnnnnnnnnnnnnnnnnnnnnnnnnnnnnnnnnnnnnnnnnnnnnnnnnnnnnnnnnnnnnnnnnnnnnnnnnnnnnnnnnnnnnnnnnnnnnnnnnnnnnnnnnnnnnnnnnnnnnnnnnnnnnnnnnnnnnnnnnnnnnnnnnnnnnnnnnnnnnnnnnnnnnnnnnnnnnnnnnnnnnnnnnnnnnnnnnnnnnnnnnnnnnnnnnnnnnnnnnnnnnnnnnnnnnnnnnnnnnnnnnnnnnnnnnnnnnnnnnnnnnnnnnnnnnnnnnnnnnnnnnnnnnnnnnnnnnnnnnnnnnnnnnnnnnnnnnnnnnnnnnnnnnnnnnnnnnnnnnnnnnnnnnnnnnnnnnnnnnnnnnnnnnnnnnnnnnnnnnnnnnnnnnnnnnnnnnnnnnnnnnnnnnnnnnnnnnnnnnnnnnnnnnnnnnnnnnnnnnnnnnnnnnnnnnnnnnnnnnnnnnnnnnnnnnnnnnnnnnnnnnnnnnnnnnnnnnnnnnnnnnnnnnnnnnnnnnnnnnnnnnnnnnnnnnnnnnnnnnnnnnnnnnnnnnnnnnnnnnnnnnnnnnnnnnnnnnnnnnnnnnnnnnnnnnnnnnnnnnnnnnnnnnnnnnnnnnnnnnnnnnnnnnnnnnnnnnnnnnnnnnnnnnnnnnnnnnnnnnnnnnnnnnnnnnnnnnnnnnnnnnnnnnnnnnnnnnnnnnnnnnnnnnnnnnnnnnnnnnnnnnnnnnnnnnnnnnnnnnnnnnnnnnnnnnnnnnnnnnnnnnnnnnnnnnnnnnnnnnnnnnnnnnnnnnnnnnnnnnnnnnnnnnnnnnnnnnnnnnnnnnnnnnnnnnnnnnnnnnnnnnnnnnnnnnnnnnnnnnnnnnnnnnnnnnnnnnnnnnnnnnnnnnnnnnnnnnnnnnnnnnnnnnnnnnnnnnnnnnnnnnnnnnnnnnnnnnnnnnnnnnnnnnnnnnnnnnnnnnnnnnnnnnnnnnnnnnnnnnnnnnnnnnnnnnnnnnnnnnnnnnnnnnnnnnnnnnnnnnnnnnnnnnnnnnnnnnnnnnnnnnnnnnnnnnnnnnnnnnnnnnnnnnnnnnnnnnnnnnnnnnnnnnnnnnnnnnnnnnnnnnnnnnnnnnnnnnnnnnnnnnnnnnnnnnnnnnnnnnnnnnnnnnnnnnnnnnnnnnnnnnnnnnnnnnnnnnnnnnnnnnnnnnnnnnnnnnnnnnnnnnnnnnnnnnnnnnnnnnnnnnnnnnnnnnnnnnnnnnnnnnnnnnnnnnnnnnnnnnnnnnnnnnnnnnnnnnnnnnnnnnnnnnnnnnnnnnnnnnnnnnnnnnnnnnnnnnnnnnnnnnnnnnnnnnnnnnnnnnnnnnnnnnnnnnnnnnnnnnnnnnnnnnnnnnnnnnnnnnnnnnnnnnnnnnnnnnnnnnnnnnnnnnnnnnnnnnnnnnnnnnnnnnnnnnnnnnnnnnnnnnnnnnnnnnnnnnnnnnnnnnnnnnnnnnnnnnnnnnnnnnnnnnnnnnnnnnnnnnnnnnnnnnnnnnnnnnnnnnnnnnnnnnnnnnnnnnnnnnnnnnnnnnnnnnnnnnnnnnnnnnnnnnnnnnnnnnnnnnnnnnnnnnnnnnnnnnnnnnnnnnnnnnnnnnnnnnnnnnnnnnnnnnnnnnnnnnnnnnnnnnnnnnnnnnnnnnnnnnnnnnnnnnnnnnnnnnnnnnnnnnnnnnnnnnnnnnnnnnnnnnnnnnnnnnnnnnnnnnnnnnnnnnnnnnnnnnnnnnnnnnnnnnnnnnnnnnnnnnnnnnnnnnnnnnnnnnnnnnnnnnnnnnnnnnnnnnnnnnnnnnnnnnnnnnnnnnnnnnnnnnnnnnnnnnnnnnnnnnnnnnnnnnnnnnnnnnnnnnnnnnnnnnnnnnnnnnnnnnnnnnnnnnnnnnnnnnnnnnnnnnnnnnnnnnnnnnnnnnnnnnnnnnnnnnnnnnnnnnnnnnnnnnnnnnnnnnnnnnnnnnnnnnnnnnnnnnnnnnnnnnnnnnnnnnnnnnnnnnnnnnnnnnnnnnnnnnnnnnnnnnnnnnnnnnnnnnnnnnnnnnnnnnnnnnnnnnnnnnnnnnnnnnnnnnnnnnnnnnnnnnnnnnnnnnnnnnnnnnnnnnnnnnnnnnnnnnnnnnnnnnnnnnnnnnnnnnnnnnnnnnnnnnnnnnnnnnnnnnnnnnnnnnnnnnnnnnnnnnnnnnnnnnnnnnnnnnnnnnnnnnnnnnnnnnnnnnnnnnnnnnnnnnnnnnnnnnnnnnnnnnnnnnnnnnnnnnnnnnnnnnnnnnnnnnnnnnnnnnnnnnnnnnnnnnnnnnnnnnnnnnnnnnnnnnnnnnnnnnnnnnnnnnnnnnnnnnnnnnnnnnnnnnnnnnnnnnnnnnnnnnnnnnnnnnnnnnnnnnnnnnnnnnnnnnnnnnnnnnnnnnnnnnnnnnnnnnnnnnnnnnnnnnnnnnnnnnnnnnnnnnnnnnnnnnnnnnnnnnnnnnnnnnnnnnnnnnnnnnnnnnnnnnnnnnnnnnnnnnnnnnnnnnnnnnnnnnnnnnnnnnnnnnnnnnnnnnnnnnnnnnnnnnnnnnnnnnnnnnnnnnnnnnnnnnnnnnnnnnnnnnnnnnnnnnnnnnnnnnnnnnnnnnnnnnnnnnnnnnnnnnnnnnnnnnnnnnnnnnnnnnnnnnnnnnnnnnnnnnnnnnnnnnnnnnnnnnnnnnnnnnnnnnnnnnnnnnnnnnnnnnnnnnnnnnnnnnnnnnnnnnnnnnnnnnnnnnnnnnnnnnnnnnnnnnnnnnnnnnnnnnnnnnnnnnnnnnnnnnnnnnnnnnnnnnnnnnnnnnnnnnnnnnnnnnnnnnnnnnnnnnnnnnnnnnnnnnnnnnnnnnnnnnnnnnnnnnnnnnnnnnnnnnnnnnnnnnnnnnnnnnnnnnnnnnnnnnnnnnnnnnnnnnnnnnnnnnnnnnnnnnnnnnnnnnnnnnnnnnnnnnnnnnnnnnnnnnnnnnnnnnnnnnnnnnnnnnnnnnnnnnnnnnnnnnnnnnnnnnnnnnnnnnnnnnnnnnnnnnnnnnnnnnnnnnnnnnnnnnnnnnnnnnnnnnnnnnnnnnnnnnnnnnnnnnnnnnnnnnnnnnnnnnnnnnnnnnnnnnnnnnnnnnnnnnnnnnnnnnnnnnnnnnnnnnnnnnnnnnnnnnnnnnnnnnnnnnnnnnnnnnnnnnnnnnnnnnnnnnnnnnnnnnnnnnnnnnnnnnnnnnnnnnnnnnnnnnnnnnnnnnnnnnnnnnnnnnnnnnnnnnnnnnnnnnnnnnnnnnnnnnnnnnnnnnnnnnnnnnnnnnnnnnnnnnnnnnnnnnnnnnnnnnnnnnnnnnnnnnnnnnnnnnnnnnnnnnnnnnnnnnnnnnnnnnnnnnnnnnnnnnnnnnnnnnnnnnnnnnnnnnnnnnnnnnnnnnnnnnnnnnnnnnnnnnnnnnnnnnnnnnnnnnnnnnnnnnnnnnnnnnnnnnnnnnnnnnnnnnnnnnnnnnnnnnnnnnnnnnnnnnnnnnnnnnnnnnnnnnnnnnnnnnnnnnnnnnnnnnnnnnnnnnnnnnnnnnnnnnnnnnnnnnnnnnnnnnnnnnnnnnnnnnnnnnnnnnnnnnnnnnnnnnnnnnnnnnnnnnnnnnnnnnnnnnnnnnnnnnnnnnnnnnnnnnnnnnnnnnnnnnnnnnnnnnnnnnnnnnnnnnnnnnnnnnnnnnnnnnnnnnnnnnnnnnnnnnnnnnnnnnnnnnnnnnnnnnnnnnnnnnnnnnnnnnnnnnnnnnnnnnnnnnnnnnnnnnnnnnnnnnnnnnnnnnnnnnnnnnnnnnnnnnnnnnnnnnnnnnnnnnnnnnnnnnnnnnnnnnnnnnnnnnnnnnnnnnnnnnnnnnnnnnnnnnnnnnnnnnnnnnnnnnnnnnnnnnnnnnnnnnnnnnnnnnnnnnnnnnnnnnnnnnnnnnnnnnnnnnnnnnnnnnnnnnnnnnnnnnnnnnnnnnnnnnnnnnnnnnnnnnnnnnnnnnnnnnnnnnnnnnnnnnnnnnnnnnnnnnnnnnnnnnnnnnnnnnnnnnnnnnnnnnnnnnnnnnnnnnnnnnnnnnnnnnnnnnnnnnnnnnnnnnnnnnnnnnnnnnnnnnnnnnnnnnnnnnnnnnnnnnnnnnnnnnnnnnnnnnnnnnnnnnnnnnnnnnnnnnnnnnnnnnnnnnnnnnnnnnnnnnnnnnnnnnnnnnnnnnnnnnnnnnnnnnnnnnnnnnnnnnnnnnnnnnnnnnnnnnnnnnnnnnnnnnnnnnnnnnnnnnnnnnnnnnnnnnnnnnnnnnnnnnnnnnnnnnnnnnnnnnnnnnnnnnnnnnnnnnnnnnnnnnnnnnnnnnnnnnnnnnnnnnnnnnnnnnnnnnnnnnnnnnnnnnnnnnnnnnnnnnnnnnnnnnnnnnnnnnnnnnnnnnnnnnnnnnnnnnnnnnnnnnnnnnnnnnnnnnnnnnnnnnnnnnnnnnnnnnnnnnnnnnnnnnnnnnnnnnnnnnnnnnnnnnnnnnnnnnnnnnnnnnnnnnnnnnnnnnnnnnnnnnnnnnnnnnnnnnnnnnnnnnnnnnnnnnnnnnnnnnnnnnnnnnnnnnnnnnnnnnnnnnnnnnnnnnnnnnnnnnnnnnnnnnnnnnnnnnnnnnnnnnnnnnnnnnnnnnnnnnnnnnnnnnnnnnnnnnnnnnnnnnnnnnnnnnnnnnnnnnnnnnnnnnnnnnnnnnnnnnnnnnnnnnnnnnnnnnnnnnnnnnnnnnnnnnnnnnnnnnnnnnnnnnnnnnnnnnnnnnnnnnnnnnnnnnnnnnnnnnnnnnnnnnnnnnnnnnnnnnnnnnnnnnnnnnnnnnnnnnnnnnnnnnnnnnnnnnnnnnnnnnnnnnnnnnnnnnnnnnnnnnnnnnnnnnnnnnnnnnnnnnnnnnnnnnnnnnnnnnnnnnnnnnnnnnnnnnnnnnnnnnnnnnnnnnnnnnnnnnnnnnnnnnnnnnnnnnnnnnnnnnnnnnnnnnnnnnnnnnnnnnnnnnnnnnnnnnnnnnnnnnnnnnnnnnnnnnnnnnnnnnnnnnnnnnnnnnnnnnnnnnnnnnnnnnnnnnnnnnnnnnnnnnnnnnnnnnnnnnnnnnnnnnnnnnnnnnnnnnnnnnnnnnnnnnnnnnnnnnnnnnnnnnnnnnnnnnnnnnnnnnnnnnnnnnnnnnnnnnnnnnnnnnnnnnnnnnnnnnnnnnnnnnnnnnnnnnnnnnnnnnnnnnnnnnnnnnnnnnnnnnnnnnnnnnnnnnnnnnnnnnnnnnnnnnnnnnnnnnnnnnnnnnnnnnnnnnnnnnnnnnnnnnnnnnnnnnnnnnnnnnnnnnnnnnnnnnnnnnnnnnnnnnnnnnnnnnnnnnnnnnnnnnnnnnnnnnnnnnnnnnnnnnnnnnnnnnnnnnnnnnnnnnnnnnnnnnnnnnnnnnnnnnnnnnnnnnnnnnnnnnnnnnnnnnnnnnnnnnnnnnnnnnnnnnnnnnnnnnnnnnnnnnnnnnnnnnnnnnnnnnnnnnnnnnnnnnnnnnnnnnnnnnnnnnnnnnnnnnnnnnnnnnnnnnnnnnnnnnnnnnnnnnnnnnnnnnnnnnnnnnnnnnnnnnnnnnnnnnnnnnnnnnnnnnnnnnnnnnnnnnnnnnnnnnnnnnnnnnnnnnnnnnnnnnnnnnnnnnnnnnnnnnnnnnnnnnnnnnnnnnnnnnnnnnnnnnnnnnnnnnnnnnnnnnnnnnnnnnnnnnnnnnnnnnnnnnnnnnnnnnnnnnnnnnnnnnnnnnnnnnnnnnnnnnnnnnnnnnnnnnnnnnnnnnnnnnnnnnnnnnnnnnnnnnnnnnnnnnnnnnnnnnnnnnnnnnnnnnnnnnnnnnnnnnnnnnnnnnnnnnnnnnnnnnnnnnnnnnnnnnnnnnnnnnnnnnnnnnnnnnnnnnnnnnnnnnnnnnnnnnnnnnnnnnnnnnnnnnnnnnnnnnnnnnnnnnnnnnnnnnnnnnnnnnnnnnnnnnnnnnnnnnnnnnnnnnnnnnnnnnnnnnnnnnnnnnnnnnnnnnnnnnnnnnnnnnnnnnnnnnnnnnnnnnnnnnnnnnnnnnnnnnnnnnnnnnnnnnnnnnnnnnnnnnnnnnnnnnnnnnnnnnnnnnnnnnnnnnnnnnnnnnnnnnnnnnnnnnnnnnnnnnnnnnnnnnnnnnnnnnnnnnnnnnnnnnnnnnnnnnnnnnnnnnnnnnnnnnnnnnnnnnnnnnnnnnnnnnnnnnnnnnnnnnnnnnnnnnnnnnnnnnnnnnnnnnnnnnnnnnnnnnnnnnnnnnnnnnnnnnnnnnnnnnnnnnnnnnnnnnnnnnnnnnnnnnnnnnnnnnnnnnnnnnnnnnnnnnnnnnnnnnnnnnnnnnnnnnnnnnnnnnnnnnnnnnnnnnnnnnnnnnnnnnnnnnnnnnnnnnnnnnnnnnnnnnnnnnnnnnnnnnnnnnnnnnnnnnnnnnnnnnnnnnnnnnnnnnnnnnnnnnnnnnnnnnnnnnnnnnnnnnnnnnnnnnnnnnnnnnnnnnnnnnnnnnnnnnnnnnnnnnnnnnnnnnnnnnnnnnnnnnnnnnnnnnnnnnnnnnnnnnnnnnnnnnnnnnnnnnnnnnnnnnnnnnnnnnnnnnnnnnnnnnnnnnnnnnnnnnnnnnnnnnnnnnnnnnnnnnnnnnnnnnnnnnnnnnnnnnnnnnnnnnnnnnnnnnnnnnnnnnnnnnnnnnnnnnnnnnnnnnnnnnnnnnnnnnnnnnnnnnnnnnnnnnnnnnnnnnnnnnnnnnnnnnnnnnnnnnnnnnnnnnnnnnnnnnnnnnnnnnnnnnnnnnnnnnnnnnnnnnnnnnnnnnnnnnnnnnnnnnnnnnnnnnnnnnnnnnnnnnnnnnnnnnnnnnnnnnnnnnnnnnnnnnnnnnnnnnnnnnnnnnnnnnnnnnnnnnnnnnnnnnnnnnnnnnnnnnnnnnnnnnnnnnnnnnnnnnnnnnnnnnnnnnnnnnnnnnnnnnnnnnnnnnnnnnnnnnnnnnnnnnnnnnnnnnnnnnnnnnnnnnnnnnnnnnnnnnnnnnnnnnnnnnnnnnnnnnnnnnnnnnnnnnnnnnnnnnnnnnnnnnnnnnnnnnnnnnnnnnnnnnnnnnnnnnnnnnnnnnnnnnnnnnnnnnnnnnnnnnnnnnnnnnnnnnnnnnnnnnnnnnnnnnnnnnnnnnnnnnnnnnnnnnnnnnnnnnnnnnnnnnnnnnnnnnnnnnnnnnnnnnnnnnnnnnnnnnnnnnnnnnnnnnnnnnnnnnnnnnnnnnnnnnnnnnnnnnnnnnnnnnnnnnnnnnnnnnnnnnnnnnnnnnnnnnnnnnnnnnnnnnnnnnnnnnnnnnnnnnnnnnnnnnnnnnnnnnnnnnnnnnnnnnnnnnnnnnnnnnnnnnnnnnnnnnnnnnnnnnnnnnnnnnnnnnnnnnnnnnnnnnnnnnnnnnnnnnnnnnnnnnnnnnnnnnnnnnnnnnnnnnnnnnnnnnnnnnnnnnnnnnnnnnnnnnnnnnnnnnnnnnnnnnnnnnnnnnnnnnnnnnnnnnnnnnnnnnnnnnnnnnnnnnnnnnnnnnnnnnnnnnnnnnnnnnnnnnnnnnnnnnnnnnnnnnnnnnnnnnnnnnnnnnnnnnnnnnnnnnnnnnnnnnnnnnnnnnnnnnnnnnnnnnnnnnnnnnnnnnnnnnnnnnnnnnnnnnnnnnnnnnnnnnnnnnnnnnnnnnnnnnnnnnnnnnnnnnnnnnnnnnnnnnnnnnnnnnnnnnnnnnnnnnnnnnnnnnnnnnnnnnnnnnnnnnnnnnnnnnnnnnnnnnnnnnnnnnnnnnnnnnnnnnnnnnnnnnnnnnnnnnnnnnnnnnnnnnnnnnnnnnnnnnnnnnnnnnnnnnnnnnnnnnnnnnnnnnnnnnnnnnnnnnnnnnnnnnnnnnnnnnnnnnnnnnnnnnnnnnnnnnnnnnnnnnnnnnnnnnnnnnnnnnnnnnnnnnnnnnnnnnnnnnnnnnnnnnnnnnnnnnnnnnnnnnnnnnnnnnnnnnnnnnnnnnnnnnnnnnnnnnnnnnnnnnnnnnnnnnnnnnnnnnnnnnnnnnnnnnnnnnnnnnnnnnnnnnnnnnnnnnnnnnnnnnnnnnnnnnnnnnnnnnnnnnnnnnnnnnnnnnnnnnnnnnnnnnnnnnnnnnnnnnnnnnnnnnnnnnnnnnnnnnnnnnnnnnnnnnnnnnnnnnnnnnnnnnnnnnnnnnnnnnnnnnnnnnnnnnnnnnnnnnnnnnnnnnnnnnnnnnnnnnnnnnnnnnnnnnnnnnnnnnnnnnnnnnnnnnnnnnnnnnnnnnnnnnnnnnnnnnnnnnnnnnnnnnnnnnnnnnnnnnnnnnnnnnnnnnnnnnnnnnnnnnnnnnnnnnnnnnnnnnnnnnnnnnnnnnnnnnnnnnnnnnnnnnnnnnnnnnnnnnnnnnnnnnnnnnnnnnnnnnnnnnnnnnnnnnnnnnnnnnnnnnnnnnnnnnnnnnnnnnnnnnnnnnnnnnnnnnnnnnnnnnnnnnnnnnnnnnnnnnnnnnnnnnnnnnnnnnnnnnnnnnnnnnnnnnnnnnnnnnnnnnnnnnnnnnnnnnnnnnnnnnnnnnnnnnnnnnnnnnnnnnnnnnnnnnnnnnnnnnnnnnnnnnnnnnnnnnnnnnnnnnnnnnnnnnnnnnnnnnnnnnnnnnnnnnnnnnnnnnnnnnnnnnnnnnnnnnnnnnnnnnnnnnnnnnnnnnnnnnnnnnnnnnnnnnnnnnnnnnnnnnnnnnnnnnnnnnnnnnnnnnnnnnnnnnnnnnnnnnnnnnnnnnnnnnnnnnnnnnnnnnnnnnnnnnnnnnnnnnnnnnnnnnnnnnnnnnnnnnnnnnnnnnnnnnnnnnnnnnnnnnnnnnnnnnnnnnnnnnnnnnnnnnnnnnnnnnnnnnnnnnnnnnnnnnnnnnnnnnnnnnnnnnnnnnnnnnnnnnnnnnnnnnnnnnnnnnnnnnnnnnnnnnnnnnnnnnnnnnnnnnnnnnnnnnnnnnnnnnnnnnnnnnnnnnnnnnnnnnnnnnnnnnnnnnnnnnnnnnnnnnnnnnnnnnnnnnnnnnnnnnnnnnnnnnnnnnnnnnnnnnnnnnnnnnnnnnnnnnnnnnnnnnnnnnnnnnnnnnnnnnnnnnnnnnnnnnnnnnnnnnnnnnnnnnnnnnnnnnnnnnnnnnnnnnnnnnnnnnnnnnnnnnnnnnnnnnnnnnnnnnnnnnnnnnnnnnnnnnnnnnnnnnnnnnnnnnnnnnnnnnnnnnnnnnnnnnnnnnnnnnnnnnnnnnnnnnnnnnnnnnnnnnnnnnnnnnnnnnnnnnnnnnnnnnnnnnnnnnnnnnnnnnnnnnnnnnnnnnnnnnnnnnnnnnnnnnnnnnnnnnnnnnnnnnnnnnnnnnnnnnnnnnnnnnnnnnnnnnnnnnnnnnnnnnnnnnnnnnnnnnnnnnnnnnnnnnnnnnnnnnnnnnnnnnnnnnnnnnnnnnnnnnnnnnnnnnnnnnnnnnnnnnnnnnnnnnnnnnnnnnnnnnnnnnnnnnnnnnnnnnnnnnnnnnnnnnnnnnnnnnnnnnnnnnnnnnnnnnnnnnnnnnnnnnnnnnnnnnnnnnnnnnnnnnnnnnnnnnnnnnnnnnnnnnnnnnnnnnnnnnnnnnnnnnnnnnnnnnnnnnnnnnnnnnnnnnnnnnnnnnnnnnnnnnnnnnnnnnnnnnnnnnnnnnnnnnnnnnnnnnnnnnnnnnnnnnnnnnnnnnnnnnnnnnnnnnnnnnnnnnnnnnnnnnnnnnnnnnnnnnnnnnnnnnnnnnnnnnnnnnnnnnnnnnnnnnnnnnnnnnnnnnnnnnnnnnnnnnnnnnnnnnnnnnnnnnnnnnnnnnnnnnnnnnnnnnnnnnnnnnnnnnnnnnnnnnnnnnnnnnnnnnnnnnnnnnnnnnnnnnnnnnnnnnnnnnnnnnnnnnnnnnnnnnnnnnnnnnnnnnnnnnnnnnnnnnnnnnnnnnnnnnnnnnnnnnnnnnnnnnnnnnnnnnnnnnnnnnnnnnnnnnnnnnnnnnnnnnnnnnnnnnnnnnnnnnnnnnnnnnnnnnnnnnnnnnnnnnnnnnnnnnnnnnnnnnnnnnnnnnnnnnnnnnnnnnnnnnnnnnnnnnnnnnnnnnnnnnnnnnnnnnnnnnnnnnnnnnnnnnnnnnnnnnnnnnnnnnnnnnnnnnnnnnnnnnnnnnnnnnnnnnnnnnnnnnnnnnnnnnnnnnnnnnnnnnnnnnnnnnnnnnnnnnnnnnnnnnnnnnnnnnnnnnnnnnnnnnnnnnnnnnnnnnnnnnnnnnnnnnnnnnnnnnnnnnnnnnnnnnnnnnnnnnnnnnnnnnnnnnnnnnnnnnnnnnnnnnnnnnnnnnnnnnnnnnnnnnnnnnnnnnnnnnnnnnnnnnnnnnnnnnnnnnnnnnnnnnnnnnnnnnnnnnnnnnnnnnnnnnnnnnnnnnnnnnnnnnnnnnnnnnnnnnnnnnnnnnnnnnnnnnnnnnnnnnnnnnnnnnnnnnnnnnnnnnnnnnnnnnnnnnnnnnnnnnnnnnnnnnnnnnnnnnnnnnnnnnnnnnnnnnnnnnnnnnnnnnnnnnnnnnnnnnnnnnnnnnnnnnnnnnnnnnnnnnnnnnnnnnnnnnnnnnnnnnnnnnnnnnnnnnnnnnnnnnnnnnnnnnnnnnnnnnnnnnnnnnnnnnnnnnnnnnnnnnnnnnnnnnnnnnnnnnnnnnnnnnnnnnnnnnnnnnnnnnnnnnnnnnnnnnnnnnnnnnnnnnnnnnnnnnnnnnnnnnnnnnnnnnnnnnnnnnnnnnnnnnnnnnnnnnnnnnnnnnnnnnnnnnnnnnnnnnnnnnnnnnnnnnnnnnnnnnnnnnnnnnnnnnnnnnnnnnnnnnnnnnnnnnnnnnnnnnnnnnnnnnnnnnnnnnnnnnnnnnnnnnnnnnnnnnnnnnnnnnnnnnnnnnnnnnnnnnnnnnnnnnnnnnnnnnnnnnnnnnnnnnnnnnnnnnnnnnnnnnnnnnnnnnnnnnnnnnnnnnnnnnnnnnnnnnnnnnnnnnnnnnnnnnnnnnnnnnnnnnnnnnnnnnnnnnnnnnnnnnnnnnnnnnnnnnnnnnnnnnnnnnnnnnnnnnnnnnnnnnnnnnnnnnnnnnnnnnnnnnnnnnnnnnnnnnnnnnnnnnnnnnnnnnnnnnnnnnnnnnnnnnnnnnnnnnnnnnnnnnnnnnnnnnnnnnnnnnnnnnnnnnnnnnnnnnnnnnnnnnnnnnnnnnnnnnnnnnnnnnnnnnnnnnnnnnnnnnnnnnnnnnnnnnnnnnnnnnnnnnnnnnnnnnnnnnnnnnnnnnnnnnnnnnnnnnnnnnnnnnnnnnnnnnnnnnnnnnnnnnnnnnnnnnnnnnnnnnnnnnnnnnnnnnnnnnnnnnnnnnnnnnnnnnnnnnnnnnnnnnnnnnnnnnnnnnnnnnnnnnnnnnnnnnnnnnnnnnnnnnnnnnnnnnnnnnnnnnnnnnnnnnnnnnnnnnnnnnnnnnnnnnnnnnnnnnnnnnnnnnnnnnnnnnnnnnnnnnnnnnnnnnnnnnnnnnnnnnnnnnnnnnnnnnnnnnnnnnnnnnnnnnnnnnnnnnnnnnnnnnnnnnnnnnnnnnnnnnnnnnnnnnnnnnnnnnnnnnnnnnnnnnnnnnnnnnnnnnnnnnnnnnnnnnnnnnnnnnnnnnnnnnnnnnnnnnnnnnnnnnnnnnnnnnnnnnnnnnnnnnnnnnnnnnnnnnnnnnnnnnnnnnnnnnnnnnnnnnnnnnnnnnnnnnnnnnnnnnnnnnnnnnnnnnnnnnnnnnnnnnnnnnnnnnnnnnnnnnnnnnnnnnnnnnnnnnnnnnnnnnnnnnnnnnnnnnnnnnnnnnnnnnnnnnnnnnnnnnnnnnnnnnnnnnnnnnnnnnnnnnnnnnnnnnnnnnnnnnnnnnnnnnnnnnnnnnnnnnnnnnnnnnnnnnnnnnnnnnnnnnnnnnnnnnnnnnnnnnnnnnnnnnnnnnnnnnnnnnnnnnnnnnnnnnnnnnnnnnnnnnnnnnnnnnnnnnnnnnnnnnnnnnnnnnnnnnnnnnnnnnnnnnnnnnnnnnnnnnnnnnnnnnnnnnnnnnnnnnnnnnnnnnnnnnnnnnnnnnnnnnnnnnnnnnnnnnnnnnnnnnnnnnnnnnnnnnnnnnnnnnnnnnnnnnnnnnnnnnnnnnnnnnnnnnnnnnnnnnnnnnnnnnnnnnnnnnnnnnnnnnnnnnnnnnnnnnnnnnnnnnnnnnnnnnnnnnnnnnnnnnnnnnnnnnnnnnnnnnnnnnnnnnnnnnnnnnnnnnnnnnnnnnnnnnnnnnnnnnnnnnnnnnnnnnnnnnnnnnnnnnnnnnnnnnnnnnnnnnnnnnnnnnnnnnnnnnnnnnnnnnnnnnnnnnnnnnnnnnnnnnnnnnnnnnnnnnnnnnnnnnnnnnnnnnnnnnnnnnnnnnnnnnnnnnnnnnnnnnnnnnnnnnnnnnnnnnnnnnnnnnnnnnnnnnnnnnnnnnnnnnnnnnnnnnnnnnnnnnnnnnnnnnnnnnnnnnnnnnnnnnnnnnnnnnnnnnnnnnnnnnnnnnnnnnnnnnnnnnnnnnnnnnnnnnnnnnnnnnnnnnnnnnnnnnnnnnnnnnnnnnnnnnnnnnnnnnnnnnnnnnnnnnnnnnnnnnnnnnnnnnnnnnnnnnnnnnnnnnnnnnnnnnnnnnnnnnnnnnnnnnnnnnnnnnnnnnnnnnnnnnnnnnnnnnnnnnnnnnnnnnnnnnnnnnnnnnnnnnnnnnnnnnnnnnnnnnnnnnnnnnnnnnnnnnnnnnnnnnnnnnnnnnnnnnnnnnnnnnnnnnnnnnnnnnnnnnnnnnnnnnnnnnnnnnnnnnnnnnnnnnnnnnnnnnnnnnnnnnnnnnnnnnnnnnnnnnnnnnnnnnnnnnnnnnnnnnnnnnnnnnnnnnnnnnnnnnnnnnnnnnnnnnnnnnnnnnnnnnnnnnnnnnnnnnnnnnnnnnnnnnnnnnnnnnnnnnnnnnnnnnnnnnnnnnnnnnnnnnnnnnnnnnnnnnnnnnnnnnnnnnnnnnnnnnnnnnnnnnnnnnnnnnnnnnnnnnnnnnnnnnnnnnnnnnnnnnnnnnnnnnnnnnnnnnnnnnnnnnnnnnnnnnnnnnnnnnnnnnnnnnnnnnnnnnnnnnnnnnnnnnnnnnnnnnnnnnnnnnnnnnnnnnnnnnnnnnnnnnnnnnnnnnnnnnnnnnnnnnnnnnnnnnnnnnnnnnnnnnnnnnnnnnnnnnnnnnnnnnnnnnnnnnnnnnnnnnnnnnnnnnnnnnnnnnnnnnnnnnnnnnnnnnnnnnnnnnnnnnnnnnnnnnnnnnnnnnnnnnnnnnnnnnnnnnnnnnnnnnnnnnnnnnnnnnnnnnnnnnnnnnnnnnnnnnnnnnnnnnnnnnnnnnnnnnnnnnnnnnnnnnnnnnnnnnnnnnnnnnnnnnnnnnnnnnnnnnnnnnnnnnnnnnnnnnnnnnnnnnnnnnnnnnnnnnnnnnnnnnnnnnnnnnnnnnnnnnnnnnnnnnnnnnnnnnnnnnnnnnnnnnnnnnnnnnnnnnnnnnnnnnnnnnnnnnnnnnnnnnnnnnnnnnnnnnnnnnnnnnnnnnnnnnnnnnnnnnnnnnnnnnnnnnnnnnnnnnnnnnnnnnnnnnnnnnnnnnnnnnnnnnnnnnnnnnnnnnnnnnnnnnnnnnnnnnnnnnnnnnnnnnnnnnnnnnnnnnnnnnnnnnnnnnnnnnnnnnnnnnnnnnnnnnnnnnnnnnnnnnnnnnnnnnnnnnnnnnnnnnnnnnnnnnnnnnnnnnnnnnnnnnnnnnnnnnnnnnnnnnnnnnnnnnnnnnnnnnnnnnnnnnnnnnnnnnnnnnnnnnnnnnnnnnnnnnnnnnnnnnnnnnnnnnnnnnnnnnnnnnnnnnnnnnnnnnnnnnnnnnnnnnnnnnnnnnnnnnnnnnnnnnnnnnnnnnnnnnnnnnnnnnnnnnnnnnnnnnnnnnnnnnnnnnnnnnnnnnnnnnnnnnnnnnnnnnnnnnnnnnnnnnnnnnnnnnnnnnnnnnnnnnnnnnnnnnnnnnnnnnnnnnnnnnnnnnnnnnnnnnnnnnnnnnnnnnnnnnnnnnnnnnnnnnnnnnnnnnnnnnnnnnnnnnnnnnnnnnnnnnnnnnnnnnnnnnnnnnnnnnnnnnnnnnnnnnnnnnnnnnnnnnnnnnnnnnnnnnnnnnnnnnnnnnnnnnnnnnnnnnnnnnnnnnnnnnnnnnnnnnnnnnnnnnnnnnnnnnnnnnnnnnnnnnnnnnnnnnnnnnnnnnnnnnnnnnnnnnnnnnnnnnnnnnnnnnnnnnnnnnnnnnnnnnnnnnnnnnnnnnnnnnnnnnnnnnnnnnnnnnnnnnnnnnnnnnnnnnnnnnnnnnnnnnnnnnnnnnnnnnnnnnnnnnnnnnnnnnnnnnnnnnnnnnnnnnnnnnnnnnnnnnnnnnnnnnnnnnnnnnnnnnnnnnnnnnnnnnnnnnnnnnnnnnnnnnnnnnnnnnnnnnnnnnnnnnnnnnnnnnnnnnnnnnnnnnnnnnnnnnnnnnnnnnnnnnnnnnnnnnnnnnnnnnnnnnnnnnnnnnnnnnnnnnnnnnnnnnnnnnnnnnnnnnnnnnnnnnnnnnnnnnnnnnnnnnnnnnnnnnnnnnnnnnnnnnnnnnnnnnnnnnnnnnnnnnnnnnnnnnnnnnnnnnnnnnnnnnnnnnnnnnnnnnnnnnnnnnnnnnnnnnnnnnnnnnnnnnnnnnnnnnnnnnnnnnnnnnnnnnnnnnnnnnnnnnnnnnnnnnnnnnnnnnnnnnnnnnnnnnnnnnnnnnnnnnnnnnnnnnnnnnnnnnnnnnnnnnnnnnnnnnnnnnnnnnnnnnnnnnnnnnnnnnnnnnnnnnnnnnnnnnnnnnnnnnnnnnnnnnnnnnnnnnnnnnnnnnnnnnnnnnnnnnnnnnnnnnnnnnnnnnnnnnnnnnnnnnnnnnnnnnnnnnnnnnnnnnnnnnnnnnnnnnnnnnnnnnnnnnnnnnnnnnnnnnnnnnnnnnnnnnnnnnnnnnnnnnnnnnnnnnnnnnnnnnnnnnnnnnnnnnnnnnnnnnnnnnnnnnnnnnnnnnnnnnnnnnnnnnnnnnnnnnnnnnnnnnnnnnnnnnnnnnnnnnnnnnnnnnnnnnnnnnnnnnnnnnnnnnnnnnnnnnnnnnnnnnnnnnnnnnnnnnnnnnnnnnnnnnnnnnnnnnnnnnnnnnnnnnnnnnnnnnnnnnnnnnnnnnnnnnnnnnnnnnnnnnnnnnnnnnnnnnnnnnnnnnnnnnnnnnnnnnnnnnnnnnnnnnnnnnnnnnnnnnnnnnnnnnnnnnnnnnnnnnnnnnnnnnnnnnnnnnnnnnnnnnnnnnnnnnnnnnnnnnnnnnnnnnnnnnnnnnnnnnnnnnnnnnnnnnnnnnnnnnnnnnnnnnnnnnnnnnnnnnnnnnnnnnnnnnnnnnnnnnnnnnnnnnnnnnnnnnnnnnnnnnnnnnnnnnnnnnnnnnnnnnnnnnnnnnnnnnnnnnnnnnnnnnnnnnnnnnnnnnnnnnnnnnnnnnnnnnnnnnnnnnnnnnnnnnnnnnnnnnnnnnnnnnnnnnnnnnnnnnnnnnnnnnnnnnnnnnnnnnnnnnnnnnnnnnnnnnnnnnnnnnnnnnnnnnnnnnnnnnnnnnnnnnnnnnnnnnnnnnnnnnnnnnnnnnnnnnnnnnnnnnnnnnnnnnnnnnnnnnnnnnnnnnnnnnnnnnnnnnnnnnnnnnnnnnnnnnnnnnnnnnnnnnnnnnnnnnnnnnnnnnnnnnnnnnnnnnnnnnnnnnnnnnnnnnnnnnnnnnnnnnnnnnnnnnnnnnnnnnnnnnnnnnnnnnnnnnnnnnnnnnnnnnnnnnnnnnnnnnnnnnnnnnnnnnnnnnnnnnnnnnnnnnnnnnnnnnnnnnnnnnnnnnnnnnnnnnnnnnnnnnnnnnnnnnnnnnnnnnnnnnnnnnnnnnnnnnnnnnnnnnnnnnnnnnnnnnnnnnnnnnnnnnnnnnnnnnnnnnnnnnnnnnnnnnnnnnnnnnnnnnnnnnnnnnnnnnnnnnnnnnnnnnnnnnnnnnnnnnnnnnnnnnnnnnnnnnnnnnnnnnnnnnnnnnnnnnnnnnnnnnnnnnnnnnnnnnnnnnnnnnnnnnnnnnnnnnnnnnnnnnnnnnnnnnnnnnnnnnnnnnnnnnnnnnnnnnnnnnnnnnnnnnnnnnnnnnnnnnnnnnnnnnnnnnnnnnnnnnnnnnnnnnnnnnnnnnnnnnnnnnnnnnnnnnnnnnnnnnnnnnnnnnnnnnnnnnnnnnnnnnnnnnnnnnnnnnnnnnnnnnnnnnnnnnnnnnnnnnnnnnnnnnnnnnnnnnnnnnnnnnnnnnnnnnnnnnnnnnnnnnnnnnnnnnnnnnnnnnnnnnnnnnnnnnnnnnnnnnnnnnnnnnnnnnnnnnnnnnnnnnnnnnnnnnnnnnnnnnnnnnnnnnnnnnnnnnnnnnnnnnnnnnnnnnnnnnnnnnnnnnnnnnnnnnnnnnnnnnnnnnnnnnnnnnnnnnnnnnnnnnnnnnnnnnnnnnnnnnnnnnnnnnnnnnnnnnnnnnnnnnnnnnnnnnnnnnnnnnnnnnnnnnnnnnnnnnnnnnnnnnnnnnnnnnnnnnnnnnnnnnnnnnnnnnnnnnnnnnnnnnnnnnnnnnnnnnnnnnnnnnnnnnnnnnnnnnnnnnnnnnnnnnnnnnnnnnnnnnnnnnnnnnnnnnnnnnnnnnnnnnnnnnnnnnnnnnnnnnnnnnnnnnnnnnnnnnnnnnnnnnnnnnnnnnnnnnnnnnnnnnnnnnnnnnnnnnnnnnnnnnnnnnnnnnnnnnnnnnnnnnnnnnnnnnnnnnnnnnnnnnnnnnnnnnnnnnnnnnnnnnnnnnnnnnnnnnnnnnnnnnnnnnnnnnnnnnnnnnnnnnnnnnnnnnnnnnnnnnnnnnnnnnnnnnnnnnnnnnnnnnnnnnnnnnnnnnnnnnnnnnnnnnnnnnnnnnnnnnnnnnnnnnnnnnnnnnnnnnnnnnnnnnnnnnnnnnnnnnnnnnnnnnnnnnnnnnnnnnnnnnnnnnnnnnnnnnnnnnnnnnnnnnnnnnnnnnnnnnnnnnnnnnnnnnnnnnnnnnnnnnnnnnnnnnnnnnnnnnnnnnnnnnnnnnnnnnnnnnnnnnnnnnnnnnnnnnnnnnnnnnnnnnnnnnnnnnnnnnnnnnnnnnnnnnnnnnnnnnnnnnnnnnnnnnnnnnnnnnnnnnnnnnnnnnnnnnnnnnnnnnnnnnnnnnnnnnnnnnnnnnnnnnnnnnnnnnnnnnnnnnnnnnnnnnnnnnnnnnnnnnnnnnnnnnnnnnnnnnnnnnnnnnnnnnnnnnnnnnnnnnnnnnnnnnnnnnnnnnnnnnnnnnnnnnnnnnnnnnnnnnnnnnnnnnnnnnnnnnnnnnnnnnnnnnnnnnnnnnnnnnnnnnnnnnnnnnnnnnnnnnnnnnnnnnnnnnnnnnnnnnnnnnnnnnnnnnnnnnnnnnnnnnnnnnnnnnnnnnnnnnnnnnnnnnnnnnnnnnnnnnnnnnnnnnnnnnnnnnnnnnnnnnnnnnnnnnnnnnnnnnnnnnnnnnnnnnnnnnnnnnnnnnnnnnnnnnnnnnnnnnnnnnnnnnnnnnnnnnnnnnnnnnnnnnnnnnnnnnnnnnnnnnnnnnnnnnnnnnnnnnnnnnnnnnnnnnnnnnnnnnnnnnnnnnnnnnnnnnnnnnnnnnnnnnnnnnnnnnnnnnnnnnnnnnnnnnnnnnnnnnnnnnnnnnnnnnnnnnnnnnnnnnnnnnnnnnnnnnnnnnnnnnnnnnnnnnnnnnnnnnnnnnnnnnnnnnnnnnnnnnnnnnnnnnnnnnnnnnnnnnnnnnnnnnnnnnnnnnnnnnnnnnnnnnnnnnnnnnnnnnnnnnnnnnnnnnnnnnnnnnnnnnnnnnnnnnnnnnnnnnnnnnnnnnnnnnnnnnnnnnnnnnnnnnnnnnnnnnnnnnnnnnnnnnnnnnnnnnnnnnnnnnnnnnnnnnnnnnnnnnnnnnnnnnnnnnnnnnnnnnnnnnnnnnnnnnnnnnnnnnnnnnnnnnnnnnnnnnnnnnnnnnnnnnnnnnnnnnnnnnnnnnnnnnnnnnnnnnnnnnnnnnnnnnnnnnnnnnnnnnnnnnnnnnnnnnnnnnnnnnnnnnnnnnnnnnnnnnnnnnnnnnnnnnnnnnnnnnnnnnnnnnnnnnnnnnnnnnnnnnnnnnnnnnnnnnnnnnnnnnnnnnnnnnnnnnnnnnnnnnnnnnnnnnnnnnnnnnnnnnnnnnnnnnnnnnnnnnnnnnnnnnnnnnnnnnnnnnnnnnnnnnnnnnnnnnnnnnnnnnnnnnnnnnnnnnnnnnnnnnnnnnnnnnnnnnnnnnnnnnnnnnnnnnnnnnnnnnnnnnnnnnnnnnnnnnnnnnnnnnnnnnnnnnnnnnnnnnnnnnnnnnnnnnnnnnnnnnnnnnnnnnnnnnnnnnnnnnnnnnnnnnnnnnnnnnnnnnnnnnnnnnnnnnnnnnnnnnnnnnnnnnnnnnnnnnnnnnnnnnnnnnnnnnnnnnnnnnnnnnnnnnnnnnnnnnnnnnnnnnnnnnnnnnnnnnnnnnnnnnnnnnnnnnnnnnnnnnnnnnnnnnnnnnnnnnnnnnnnnnnnnnnnnnnnnnnnnnnnnnnnnnnnnnnnnnnnnnnnnnnnnnnnnnnnnnnnnnnnnnnnnnnnnnnnnnnnnnnnnnnnnnnnnnnnnnnnnnnnnnnnnnnnnnnnnnnnnnnnnnnnnnnnnnnnnnnnnnnnnnnnnnnnnnnnnnnnnnnnnnnnnnnnnnnnnnnnnnnnnnnnnnnnnnnnnnnnnnnnnnnnnnnnnnnnnnnnnnnnnnnnnnnnnnnnnnnnnnnnnnnnnnnnnnnnnnnnnnnnnnnnnnnnnnnnnnnnnnnnnnnnnnnnnnnnnnnnnnnnnnnnnnnnnnnnnnnnnnnnnnnnnnnnnnnnnnnnnnnnnnnnnnnnnnnnnnnnnnnnnnnnnnnnnnnnnnnnnnnnnnnnnnnnnnnnnnnnnnnnnnnnnnnnnnnnnnnnnnnnnnnnnnnnnnnnnnnnnnnnnnnnnnnnnnnnnnnnnnnnnnnnnnnnnnnnnnnnnnnnnnnnnnnnnnnnnnnnnnnnnnnnnnnnnnnnnnnnnnnnnnnnnnnnnnnnnnnnnnnnnnnnnnnnnnnnnnnnnnnnnnnnnnnnnnnnnnnnnnnnnnnnnnnnnnnnnnnnnnnnnnnnnnnnnnnnnnnnnnnnnnnnnnnnnnnnnnnnnnnnnnnnnnnnnnnnnnnnnnnnnnnnnnnnnnnnnnnnnnnnnnnnnnnnnnnnnnnnnnnnnnnnnnnnnnnnnnnnnnnnnnnnnnnnnnnnnnnnnnnnnnnnnnnnnnnnnnnnnnnnnnnnnnnnnnnnnnnnnnnnnnnnnnnnnnnnnnnnnnnnnnnnnnnnnnnnnnnnnnnnnnnnnnnnnnnnnnnnnnnnnnnnnnnnnnnnnnnnnnnnnnnnnnnnnnnnnnnnnnnnnnnnnnnnnnnnnnnnnnnnnnnnnnnnnnnnnnnnnnnnnnnnnnnnnnnnnnnnnnnnnnnnnnnnnnnnnnnnnnnnnnnnnnnnnnnnnnnnnnnnnnnnnnnnnnnnnnnnnnnnnnnnnnnnnnnnnnnnnnnnnnnnnnnnnnnnnnnnnnnnnnnnnnnnnnnnnnnnnnnnnnnnnnnnnnnnnnnnnnnnnnnnnnnnnnnnnnnnnnnnnnnnnnnnnnnnnnnnnnnnnnnnnnnnnnnnnnnnnnnnnnnnnnnnnnnnnnnnnnnnnnnnnnnnnnnnnnnnnnnnnnnnnnnnnnnnnnnnnnnnnnnnnnnnnnnnnnnnnnnnnnnnnnnnnnnnnnnnnnnnnnnnnnnnnnnnnnnnnnnnnnnnnnnnnnnnnnnnnnnnnnnnnnnnnnnnnnnnnnnnnnnnnnnnnnnnnnnnnnnnnnnnnnnnnnnnnnnnnnnnnnnnnnnnnnnnnnnnnnnnnnnnnnnnnnnnnnnnnnnnnnnnnnnnnnnnnnnnnnnnnnnnnnnnnnnnnnnnnnnnnnnnnnnnnnnnnnnnnnnnnnnnnnnnnnnnnnnnnnnnnnnnnnnnnnnnnnnnnnnnnnnnnnnnnnnnnnnnnnnnnnnnnnnnnnnnnnnnnnnnnnnnnnnnnnnnnnnnnnnnnnnnnnnnnnnnnnnnnnnnnnnnnnnnnnnnnnnnnnnnnnnnnnnnnnnnnnnnnnnnnnnnnnnnnnnnnnnnnnnnnnnnnnnnnnnnnnnnnnnnnnnnnnnnnnnnnnnnnnnnnnnnnnnnnnnnnnnnnnnnnnnnnnnnnnnnnnnnnnnnnnnnnnnnnnnnnnnnnnnnnnnnnnnnnnnnnnnnnnnnnnnnnnnnnnnnnnnnnnnnnnnnnnnnnnnnnnnnnnnnnnnnnnnnnnnnnnnnnnnnnnnnnnnnnnnnnnnnnnnnnnnnnnnnnnnnnnnnnnnnnnnnnnnnnnnnnnnnnnnnnnnnnnnnnnnnnnnnnnnnnnnnnnnnnnnnnnnnnnnnnnnnnnnnnnnnnnnnnnnnnnnnnnnnnnnnnnnnnnnnnnnnnnnnnnnnnnnnnnnnnnnnnnnnnnnnnnnnnnnnnnnnnnnnnnnnnnnnnnnnnnnnnnnnnnnnnnnnnnnnnnnnnnnnnnnnnnnnnnnnnnnnnnnnnnnnnnnnnnnnnnnnnnnnnnnnnnnnnnnnnnnnnnnnnnnnnnnnnnnnnnnnnnnnnnnnnnnnnnnnnnnnnnnnnnnnnnnnnnnnnnnnnnnnnnnnnnnnnnnnnnnnnnnnnnnnnnnnnnnnnnnnnnnnnnnnnnnnnnnnnnnnnnnnnnnnnnnnnnnnnnnnnnnnnnnnnnnnnnnnnnnnnnnnnnnnnnnnnnnnnnnnnnnnnnnnnnnnnnnnnnnnnnnnnnnnnnnnnnnnnnnnnnnnnnnnnnnnnnnnnnnnnnnnnnnnnnnnnnnnnnnnnnnnnnnnnnnnnnnnnnnnnnnnnnnnnnnnnnnnnnnnnnnnnnnnnnnnnnnnnnnnnnnnnnnnnnnnnnnnnnnnnnnnnnnnnnnnnnnnnnnnnnnnnnnnnnnnnnnnnnnnnnnnnnnnnnnnnnnnnnnnnnnnnnnnnnnnnnnnnnnnnnnnnnnnnnnnnnnnnnnnnnnnnnnnnnnnnnnnnnnnnnnnnnnnnnnnnnnnnnnnnnnnnnnnnnnnnnnnnnnnnnnnnnnnnnnnnnnnnnnnnnnnnnnnnnnnnnnnnnnnnnnnnnnnnnnnnnnnnnnnnnnnnnnnnnnnnnnnnnnnnnnnnnnnnnnnnnnnnnnnnnnnnnnnnnnnnnnnnnnnnnnnnnnnnnnnnnnnnnnnnnnnnnnnnnnnnnnnnnnnnnnnnnnnnnnnnnnnnnnnnnnnnnnnnnnnnnnnnnnnnnnnnnnnnnnnnnnnnnnnnnnnnnnnnnnnnnnnnnnnnnnnnnnnnnnnnnnnnnnnnnnnnnnnnnnnnnnnnnnnnnnnnnnnnnnnnnnnnnnnnnnnnnnnnnnnnnnnnnnnnnnnnnnnnnnnnnnnnnnnnnnnnnnnnnnnnnnnnnnnnnnnnnnnnnnnnnnnnnnnnnnnnnnnnnnnnnnnnnnnnnnnnnnnnnnnnnnnnnnnnnnnnnnnnnnnnnnnnnnnnnnnnnnnnnnnnnnnnnnnnnnnnnnnnnnnnnnnnnnnnnnnnnnnnnnnnnnnnnnnnnnnnnnnnnnnnnnnnnnnnnnnnnnnnnnnnnnnnnnnnnnnnnnnnnnnnnnnnnnnnnnnnnnnnnnnnnnnnnnnnnnnnnnnnnnnnnnnnnnnnnnnnnnnnnnnnnnnnnnnnnnnnnnnnnnnnnnnnnnnnnnnnnnnnnnnnnnnnnnnnnnnnnnnnnnnnnnnnnnnnnnnnnnnnnnnnnnnnnnnnnnnnnnnnnnnnnnnnnnnnnnnnnnnnnnnnnnnnnnnnnnnnnnnnnnnnnnnnnnnnnnnnnnnnnnnnnnnnnnnnnnnnnnnnnnnnnnnnnnnnnnnnnnnnnnnnnnnnnnnnnnnnnnnnnnnnnnnnnnnnnnnnnnnnnnnnnnnnnnnnnnnnnnnnnnnnnnnnnnnnnnnnnnnnnnnnnnnnnnnnnnnnnnnnnnnnnnnnnnnnnnnnnnnnnnnnnnnnnnnnnnnnnnnnnnnnnnnnnnnnnnnnnnnnnnnnnnnnnnnnnnnnnnnnnnnnnnnnnnnnnnnnnnnnnnnnnnnnnnnnnnnnnnnnnnnnnnnnnnnnnnnnnnnnnnnnnnnnnnnnnnnnnnnnnnnnnnnnnnnnnnnnnnnnnnnnnnnnnnnnnnnnnnnnnnnnnnnnnnnnnnnnnnnnnnnnnnnnnnnnnnnnnnnnnnnnnnnnnnnnnnnnnnnnnnnnnnnnnnnnnnnnnnnnnnnnnnnnnnnnnnnnnnnnnnnnnnnnnnnnnnnnnnnnnnnnnnnnnnnnnnnnnnnnnnnnnnnnnnnnnnnnnnnnnnnnnnnnnnnnnnnnnnnnnnnnnnnnnnnnnnnnnnnnnnnnnnnnnnnnnnnnnnnnnnnnnnnnnnnnnnnnnnnnnnnnnnnnnnnnnnnnnnnnnnnnnnnnnnnnnnnnnnnnnnnnnnnnnnnnnnnnnnnnnnnnnnnnnnnnnnnnnnnnnnnnnnnnnnnnnnnnnnnnnnnnnnnnnnnnnnnnnnnnnnnnnnnnnnnnnnnnnnnnnnnnnnnnnnnnnnnnnnnnnnnnnnnnnnnnnnnnnnnnnnnnnnnnnnnnnnnnnnnnnnnnnnnnnnnnnnnnnnnnnnnnnnnnnnnnnnnnnnnnnnnnnnnnnnnnnnnnnnnnnnnnnnnnnnnnnnnnnnnnnnnnnnnnnnnnnnnnnnnnnnnnnnnnnnnnnnnnnnnnnnnnnnnnnnnnnnnnnnnnnnnnnnnnnnnnnnnnnnnnnnnnnnnnnnnnnnnnnnnnnnnnnnnnnnnnnnnnnnnnnnnnnnnnnnnnnnnnnnnnnnnnnnnnnnnnnnnnnnnnnnnnnnnnnnnnnnnnnnnnnnnnnnnnnnnnnnnnnnnnnnnnnnnnnnnnnnnnnnnnnnnnnnnnnnnnnnnnnnnnnnnnnnnnnnnnnnnnnnnnnnnnnnnnnnnnnnnnnnnnnnnnnnnnnnnnnnnnnnnnnnnnnnnnnnnnnnnnnnnnnnnnnnnnnnnnnnnnnnnnnnnnnnnnnnnnnnnnnnnnnnnnnnnnnnnnnnnnnnnnnnnnnnnnnnnnnnnnnnnnnnnnnnnnnnnnnnnnnnnnnnnnnnnnnnnnnnnnnnnnnnnnnnnnnnnnnnnnnnnnnnnnnnnnnnnnnnnnnnnnnnnnnnnnnnnnnnnnnnnnnnnnnnnnnnnnnnnnnnnnnnnnnnnnnnnnnnnnnnnnnnnnnnnnnnnnnnnnnnnnnnnnnnnnnnnnnnnnnnnnnnnnnnnnnnnnnnnnnnnnnnnnnnnnnnnnnnnnnnnnnnnnnnnnnnnnnnnnnnnnnnnnnnnnnnnnnnnnnnnnnnnnnnnnnnnnnnnnnnnnnnnnnnnnnnnnnnnnnnnnnnnnnnnnnnnnnnnnnnnnnnnnnnnnnnnnnnnnnnnnnnnnnnnnnnnnnnnnnnnnnnnnnnnnnnnnnnnnnnnnnnnnnnnnnnnnnnnnnnnnnnnnnnnnnnnnnnnnnnnnnnnnnnnnnnnnnnnnnnnnnnnnnnnnnnnnnnnnnnnnnnnnnnnnnnnnnnnnnnnnnnnnnnnnnnnnnnnnnnnnnnnnnnnnnnnnnnnnnnnnnnnnnnnnnnnnnnnnnnnnnnnnnnnnnnnnnnnnnnnnnnnnnnnnnnnnnnnnnnnnnnnnnnnnnnnnnnnnnnnnnnnnnnnnnnnnnnnnnnnnnnnnnnnnnnnnnnnnnnnnnnnnnnnnnnnnnnnnnnnnnnnnnnnnnnnnnnnnnnnnnnnnnnnnnnnnnnnnnnnnnnnnnnnnnnnnnnnnnnnnnnnnnnnnnnnnnnnnnnnnnnnnnnnnnnnnnnnnnnnnnnnnnnnnnnnnnnnnnnnnnnnnnnnnnnnnnnnnnnnnnnnnnnnnnnnnnnnnnnnnnnnnnnnnnnnnnnnnnnnnnnnnnnnnnnnnnnnnnnnnnnnnnnnnnnnnnnnnnnnnnnnnnnnnnnnnnnnnnnnnnnnnnnnnnnnnnnnnnnnnnnnnnnnnnnnnnnnnnnnnnnnnnnnnnnnnnnnnnnnnnnnnnnnnnnnnnnnnnnnnnnnnnnnnnnnnnnnnnnnnnnnnnnnnnnnnnnnnnnnnnnnnnnnnnnnnnnnnnnnnnnnnnnnnnnnnnnnnnnnnnnnnnnnnnnnnnnnnnnnnnnnnnnnnnnnnnnnnnnnnnnnnnnnnnnnnnnnnnnnnnnnnnnnnnnnnnnnnnnnnnnnnnnnnnnnnnnnnnnnnnnnnnnnnnnnnnnnnnnnnnnnnnnnnnnnnnnnnnnnnnnnnnnnnnnnnnnnnnnnnnnnnnnnnnnnnnnnnnnnnnnnnnnnnnnnnnnnnnnnnnnnnnnnnnnnnnnnnnnnnnnnnnnnnnnnnnnnnnnnnnnnnnnnnnnnnnnnnnnnnnnnnnnnnnnnnnnnnnnnnnnnnnnnnnnnnnnnnnnnnnnnnnnnnnnnnnnnnnnnnnnnnnnnnnnnnnnnnnnnnnnnnnnnnnnnnnnnnnnnnnnnnnnnnnnnnnnnnnnnnnnnnnnnnnnnnnnnnnnnnnnnnnnnnnnnnnnnnnnnnnnnnnnnnnnnnnnnnnnnnnnnnnnnnnnnnnnnnnnnnnnnnnnnnnnnnnnnnnnnnnnnnnnnnnnnnnnnnnnnnnnnnnnnnnnnnnnnnnnnnnnnnnnnnnnnnnnnnnnnnnnnnnnnnnnnnnnnnnnnnnnnnnnnnnnnnnnnnnnnnnnnnnnnnnnnnnnnnnnnnnnnnnnnnnnnnnnnnnnnnnnnnnnnnnnnnnnnnnnnnnnnnnnnnnnnnnnnnnnnnnnnnnnnnnnnnnnnnnnnnnnnnnnnnnnnnnnnnnnnnnnnnnnnnnnnnnnnnnnnnnnnnnnnnnnnnnnnnnnnnnnnnnnnnnnnnnnnnnnnnnnnnnnnnnnnnnnnnnnnnnnnnnnnnnnnnnnnnnnnnnnnnnnnnnnnnnnnnnnnnnnnnnnnnnnnnnnnnnnnnnnnnnnnnnnnnnnnnnnnnnnnnnnnnnnnnnnnnnnnnnnnnnnnnnnnnnnnnnnnnnnnnnnnnnnnnnnnnnnnnnnnnnnnnnnnnnnnnnnnnnnnnnnnnnnnnnnnnnnnnnnnnnnnnnnnnnnnnnnnnnnnnnnnnnnnnnnnnnnnnnnnnnnnnnnnnnnnnnnnnnnnnnnnnnnnnnnnnnnnnnnnnnnnnnnnnnnnnnnnnnnnnnnnnnnnnnnnnnnnnnnnnnnnnnnnnnnnnnnnnnnnnnnnnnnnnnnnnnnnnnnnnnnnnnnnnnnnnnnnnnnnnnnnnnnnnnnnnnnnnnnnnnnnnnnnnnnnnnnnnnnnnnnnnnnnnnnnnnnnnnnnnnnnnnnnnnnnnnnnnnnnnnnnnnnnnnnnnnnnnnnnnnnnnnnnnnnnnnnnnnnnnnnnnnnnnnnnnnnnnnnnnnnnnnnnnnnnnnnnnnnnnnnnnnnnnnnnnnnnnnnnnnnnnnnnnnnnnnnnnnnnnnnnnnnnnnnnnnnnnnnnnnnnnnnnnnnnnnnnnnnnnnnnnnnnnnnnnnnnnnnnnnnnnnnnnnnnnnnnnnnnnnnnnnnnnnnnnnnnnnnnnnnnnnnnnnnnnnnnnnnnnnnnnnnnnnnnnnnnnnnnnnnnnnnnnnnnnnnnnnnnnnnnnnnnnnnnnnnnnnnnnnnnnnnnnnnnnnnnnnnnnnnnnnnnnnnnnnnnnnnnnnnnnnnnnnnnnnnnnnnnnnnnnnnnnnnnnnnnnnnnnnnnnnnnnnnnnnnnnnnnnnnnnnnnnnnnnnnnnnnnnnnnnnnnnnnnnnnnnnnnnnnnnnnnnnnnnnnnnnnnnnnnnnnnnnnnnnnnnnnnnnnnnnnnnnnnnnnnnnnnnnnnnnnnnnnnnnnnnnnnnnnnnnnnnnnnnnnnnnnnnnnnnnnnnnnnnnnnnnnnnnnnnnnnnnnnnnnnnnnnnnnnnnnnnnnnnnnnnnnnnnnnnnnnnnnnnnnnnnnnnnnnnnnnnnnnnnnnnnnnnnnnnnnnnnnnnnnnnnnnnnnnnnnnnnnnnnnnnnnnnnnnnnnnnnnnnnnnnnnnnnnnnnnnnnnnnnnnnnnnnnnnnnnnnnnnnnnnnnnnnnnnnnnnnnnnnnnnnnnnnnnnnnnnnnnnnnnnnnnnnnnnnnnnnnnnnnnnnnnnnnnnnnnnnnnnnnnnnnnnnnnnnnnnnnnnnnnnnnnnnnnnnnnnnnnnnnnnnnnnnnnnnnnnnnnnnnnnnnnnnnnnnnnnnnnnnnnnnnnnnnnnnnnnnnnnnnnnnnnnnnnnnnnnnnnnnnnnnnnnnnnnnnnnnnnnnnnnnnnnnnnnnnnnnnnnnnnnnnnnnnnnnnnnnnnnnnnnnnnnnnnnnnnnnnnnnnnnnnnnnnnnnnnnnnnnnnnnnnnnnnnnnnnnnnnnnnnnnnnnnnnnnnnnnnnnnnnnnnnnnnnnnnnnnnnnnnnnnnnnnnnnnnnnnnnnnnnnnnnnnnnnnnnnnnnnnnnnnnnnnnnnnnnnnnnnnnnnnnnnnnnnnnnnnnnnnnnnnnnnnnnnnnnnnnnnnnnnnnnnnnnnnnnnnnnnnnnnnnnnnnnnnnnnnnnnnnnnnnnnnnnnnnnnnnnnnnnnnnnnnnnnnnnnnnnnnnnnnnnnnnnnnnnnnnnnnnnnnnnnnnnnnnnnnnnnnnnnnnnnnnnnnnnnnnnnnnnnnnnnnnnnnnnnnnnnnnnnnnnnnnnnnnnnnnnnnnnnnnnnnnnnnnnnnnnnnnnnnnnnnnnnnnnnnnnnnnnnnnnnnnnnnnnnnnnnnnnnnnnnnnnnnnnnnnnnnnnnnnnnnnnnnnnnnnnnnnnnnnnnnnnnnnnnnnnnnnnnnnnnnnnnnnnnnnnnnnnnnnnnnnnnnnnnnnnnnnnnnnnnnnnnnnnnnnnnnnnnnnnnnnnnnnnnnnnnnnnnnnnnnnnnnnnnnnnnnnnnnnnnnnnnnnnnnnnnnnnnnnnnnnnnnnnnnnnnnnnnnnnnnnnnnnnnnnnnnnnnnnnnnnnnnnnnnnnnnnnnnnnnnnnnnnnnnnnnnnnnnnnnnnnnnnnnnnnnnnnnnnnnnnnnnnnnnnnnnnnnnnnnnnnnnnnnnnnnnnnnnnnnnnnnnnnnnnnnnnnnnnnnnnnnnnnnnnnnnnnnnnnnnnnnnnnnnnnnnnnnnnnnnnnnnnnnnnnnnnnnnnnnnnnnnnnnnnnnnnnnnnnnnnnnnnnnnnnnnnnnnnnnnnnnnnnnnnnnnnnnnnnnnnnnnnnnnnnnnnnnnnnnnnnnnnnnnnnnnnnnnnnnnnnnnnnnnnnnnnnnnnnnnnnnnnnnnnnnnnnnnnnnnnnnnnnnnnnnnnnnnnnnnnnnnnnnnnnnnnnnnnnnnnnnnnnnnnnnnnnnnnnnnnnnnnnnnnnnnnnnnnnnnnnnnnnnnnnnnnnnnnnnnnnnnnnnnnnnnnnnnnnnnnnnnnnnnnnnnnnnnnnnnnnnnnnnnnnnnnnnnnnnnnnnnnnnnnnnnnnnnnnnnnnnnnnnnnnnnnnnnnnnnnnnnnnnnnnnnnnnnnnnnnnnnnnnnnnnnnnnnnnnnnnnnnnnnnnnnnnnnnnnnnnnnnnnnnnnnnnnnnnnnnnnnnnnnnnnnnnnnnnnnnnnnnnnnnnnnnnnnnnnnnnnnnnnnnnnnnnnnnnnnnnnnnnnnnnnnnnnnnnnnnnnnnnnnnnnnnnnnnnnnnnnnnnnnnnnnnnnnnnnnnnnnnnnnnnnnnnnnnnnnnnnnnnnnnnnnnnnnnnnnnnnnnnnnnnnnnnnnnnnnnnnnnnnnnnnnnnnnnnnnnnnnnnnnnnnnnnnnnnnnnnnnnnnnnnnnnnnnnnnnnnnnnnnnnnnnnnnnnnnnnnnnnnnnnnnnnnnnnnnnnnnnnnnnnnnnnnnnnnnnnnnnnnnnnnnnnnnnnnnnnnnnnnnnnnnnnnnnnnnnnnnnnnnnnnnnnnnnnnnnnnnnnnnnnnnnnnnnnnnnnnnnnnnnnnnnnnnnnnnnnnnnnnnnnnnnnnnnnnnnnnnnnnnnnnnnnnnnnnnnnnnnnnnnnnnnnnnnnnnnnnnnnnnnnnnnnnnnnnnnnnnnnnnnnnnnnnnnnnnnnnnnnnnnnnnnnnnnnnnnnnnnnnnnnnnnnnnnnnnnnnnnnnnnnnnnnnnnnnnnnnnnnnnnnnnnnnnnnnnnnnnnnnnnnnnnnnnnnnnnnnnnnnnnnnnnnnnnnnnnnnnnnnnnnnnnnnnnnnnnnnnnnnnnnnnnnnnnnnnnnnnnnnnnnnnnnnnnnnnnnnnnnnnnnnnnnnnnnnnnnnnnnnnnnnnnnnnnnnnnnnnnnnnnnnnnnnnnnnnnnnnnnnnnnnnnnnnnnnnnnnnnnnnnnnnnnnnnnnnnnnnnnnnnnnnnnnnnnnnnnnnnnnnnnnnnnnnnnnnnnnnnnnnnnnnnnnnnnnnnnnnnnnnnnnnnnnnnnnnnnnnnnnnnnnnnnnnnnnnnnnnnnnnnnnnnnnnnnnnnnnnnnnnnnnnnnnnnnnnnnnnnnnnnnnnnnnnnnnnnnnnnnnnnnnnnnnnnnnnnnnnnnnnnnnnnnnnnnnnnnnnnnnnnnnnnnnnnnnnnnnnnnnnnnnnnnnnnnnnnnnnnnnnnnnnnnnnnnnnnnnnnnnnnnnnnnnnnnnnnnnnnnnnnnnnnnnnnnnnnnnnnnnnnnnnnnnnnnnnnnnnnnnnnnnnnnnnnnnnnnnnnnnnnnnnnnnnnnnnnnnnnnnnnnnnnnnnnnnnnnnnnnnnnnnnnnnnnnnnnnnnnnnnnnnnnnnnnnnnnnnnnnnnnnnnnnnnnnnnnnnnnnnnnnnnnnnnnnnnnnnnnnnnnnnnnnnnnnnnnnnnnnnnnnnnnnnnnnnnnnnnnnnnnnnnnnnnnnnnnnnnnnnnnnnnnnnnnnnnnnnnnnnnnnnnnnnnnnnnnnnnnnnnnnnnnnnnnnnnnnnnnnnnnnnnnnnnnnnnnnnnnnnnnnnnnnnnnnnnnnnnnnnnnnnnnnnnnnnnnnnnnnnnnnnnnnnnnnnnnnnnnnnnnnnnnnnnnnnnnnnnnnnnnnnnnnnnnnnnnnnnnnnnnnnnnnnnnnnnnnnnnnnnnnnnnnnnnnnnnnnnnnnnnnnnnnnnnnnnnnnnnnnnnnnnnnnnnnnnnnnnnnnnnnnnnnnnnnnnnnnnnnnnnnnnnnnnnnnnnnnnnnnnnnnnnnnnnnnnnnnnnnnnnnnnnnnnnnnnnnnnnnnnnnnnnnnnnnnnnnnnnnnnnnnnnnnnnnnnnnnnnnnnnnnnnnnnnnnnnnnnnnnnnnnnnnnnnnnnnnnnnnnnnnnnnnnnnnnnnnnnnnnnnnnnnnnnnnnnnnnnnnnnnnnnnnnnnnnnnnnnnnnnnnnnnnnnnnnnnnnnnnnnnnnnnnnnnnnnnnnnnnnnnnnnnnnnnnnnnnnnnnnnnnnnnnnnnnnnnnnnnnnnnnnnnnnnnnnnnnnnnnnnnnnnnnnnnnnnnnnnnnnnnnnnnnnnnnnnnnnnnnnnnnnnnnnnnnnnnnnnnnnnnnnnnnnnnnnnnnnnnnnnnnnnnnnnnnnnnnnnnnnnnnnnnnnnnnnnnnnnnnnnnnnnnnnnnnnnnnnnnnnnnnnnnnnnnnnnnnnnnnnnnnnnnnnnnnnnnnnnnnnnnnnnnnnnnnnnnnnnnnnnnnnnnnnnnnnnnnnnnnnnnnnnnnnnnnnnnnnnnnnnnnnnnnnnnnnnnnnnnnnnnnnnnnnnnnnnnnnnnnnnnnnnnnnnnnnnnnnnnnnnnnnnnnnnnnnnnnnnnnnnnnnnnnnnnnnnnnnnnnnnnnnnnnnnnnnnnnnnnnnnnnnnnnnnnnnnnnnnnnnnnnnnnnnnnnnnnnnnnnnnnnnnnnnnnnnnnnnnnnnnnnnnnnnnnnnnnnnnnnnnnnnnnnnnnnnnnnnnnnnnnnnnnnnnnnnnnnnnnnnnnnnnnnnnnnnnnnnnnnnnnnnnnnnnnnnnnnnnnnnnnnnnnnnnnnnnnnnnnnnnnnnnnnnnnnnnnnnnnnnnnnnnnnnnnnnnnnnnnnnnnnnnnnnnnnnnnnnnnnnnnnnnnnnnnnnnnnnnnnnnnnnnnnnnnnnnnnnnnnnnnnnnnnnnnnnnnnnnnnnnnnnnnnnnnnnnnnnnnnnnnnnnnnnnnnnnnnnnnnnnnnnnnnnnnnnnnnnnnnnnnnnnnnnnnnnnnnnnnnnnnnnnnnnnnnnnnnnnnnnnnnnnnnnnnnnnnnnnnnnnnnnnnnnnnnnnnnnnnnnnnnnnnnnnnnnnnnnnnnnnnnnnnnnnnnnnnnnnnnnnnnnnnnnnnnnnnnnnnnnnnnnnnnnnnnnnnnnnnnnnnnnnnnnnnnnnnnnnnnnnnnnnnnnnnnnnnnnnnnnnnnnnnnnnnnnnnnnnnnnnnnnnnnnnnnnnnnnnnnnnnnnnnnnnnnnnnnnnnnnnnnnnnnnnnnnnnnnnnnnnnnnnnnnnnnnnnnnnnnnnnnnnnnnnnnnnnnnnnnnnnnnnnnnnnnnnnnnnnnnnnnnnnnnnnnnnnnnnnnnnnnnnnnnnnnnnnnnnnnnnnnnnnnnnnnnnnnnnnnnnnnnnnnnnnnnnnnnnnnnnnnnnnnnnnnnnnnnnnnnnnnnnnnnnnnnnnnnnnnnnnnnnnnnnnnnnnnnnnnnnnnnnnnnnnnnnnnnnnnnnnnnnnnnnnnnnnnnnnnnnnnnnnnnnnnnnnnnnnnnnnnnnnnnnnnnnnnnnnnnnnnnnnnnnnnnnnnnnnnnnnnnnnnnnnnnnnnnnnnnnnnnnnnnnnnnnnnnnnnnnnnnnnnnnnnnnnnnnnnnnnnnnnnnnnnnnnnnnnnnnnnnnnnnnnnnnnnnnnnnnnnnnnnnnnnnnnnnnnnnnnnnnnnnnnnnnnnnnnnnnnnnnnnnnnnnnnnnnnnnnnnnnnnnnnnnnnnnnnnnnnnnnnnnnnnnnnnnnnnnnnnnnnnnnnnnnnnnnnnnnnnnnnnnnnnnnnnnnnnnnnnnnnnnnnnnnnnnnnnnnnnnnnnnnnnnnnnnnnnnnnnnnnnnnnnnnnnnnnnnnnnnnnnnnnnnnnnnnnnnnnnnnnnnnnnnnnnnnnnnnnnnnnnnnnnnnnnnnnnnnnnnnnnnnnnnnnnnnnnnnnnnnnnnnnnnnnnnnnnnnnnnnnnnnnnnnnnnnnnnnnnnnnnnnnnnnnnnnnnnnnnnnnnnnnnnnnnnnnnnnnnnnnnnnnnnnnnnnnnnnnnnnnnnnnnnnnnnnnnnnnnnnnnnnnnnnnnnnnnnnnnnnnnnnnnnnnnnnnnnnnnnnnnnnnnnnnnnnnnnnnnnnnnnnnnnnnnnnnnnnnnnnnnnnnnnnnnnnnnnnnnnnnnnnnnnnnnnnnnnnnnnnnnnnnnnnnnnnnnnnnnnnnnnnnnnnnnnnnnnnnnnnnnnnnnnnnnnnnnnnnnnnnnnnnnnnnnnnnnnnnnnnnnnnnnnnnnnnnnnnnnnnnnnnnnnnnnnnnnnnnnnnnnnnnnnnnnnnnnnnnnnnnnnnnnnnnnnnnnnnnnnnnnnnnnnnnnnnnnnnnnnnnnnnnnnnnnnnnnnnnnnnnnnnnnnnnnnnnnnnnnnnnnnnnnnnnnnnnnnnnnnnnnnnnnnnnnnnnnnnnnnnnnnnnnnnnnnnnnnnnnnnnnnnnnnnnnnnnnnnnnnnnnnnnnnnnnnnnnnnnnnnnnnnnnnnnnnnnnnnnnnnnnnnnnnnnnnnnnnnnnnnnnnnnnnnnnnnnnnnnnnnnnnnnnnnnnnnnnnnnnnnnnnnnnnnnnnnnnnnnnnnnnnnnnnnnnnnnnnnnnnnnnnnnnnnnnnnnnnnnnnnnnnnnnnnnnnnnnnnnnnnnnnnnnnnnnnnnnnnnnnnnnnnnnnnnnnnnnnnnnnnnnnnnnnnnnnnnnnnnnnnnnnnnnnnnnnnnnnnnnnnnnnnnnnnnnnnnnnnnnnnnnnnnnnnnnnnnnnnnnnnnnnnnnnnnnnnnnnnnnnnnnnnnnnnnnnnnnnnnnnnnnnnnnnnnnnnnnnnnnnnnnnnnnnnnnnnnnnnnnnnnnnnnnnnnnnnnnnnnnnnnnnnnnnnnnnnnnnnnnnnnnnnnnnnnnnnnnnnnnnnnnnnnnnnnnnnnnnnnnnnnnnnnnnnnnnnnnnnnnnnnnnnnnnnnnnnnnnnnnnnnnnnnnnnnnnnnnnnnnnnnnnnnnnnnnnnnnnnnnnnnnnnnnnnnnnnnnnnnnnnnnnnnnnnnnnnnnnnnnnnnnnnnnnnnnnnnnnnnnnnnnnnnnnnnnnnnnnnnnnnnnnnnnnnnnnnnnnnnnnnnnnnnnnnnnnnnnnnnnnnnnnnnnnnnnnnnnnnnnnnnnnnnnnnnnnnnnnnnnnnnnnnnnnnnnnnnnnnnnnnnnnnnnnnnnnnnnnnnnnnnnnnnnnnnnnnnnnnnnnnnnnnnnnnnnnnnnnnnnnnnnnnnnnnnnnnnnnnnnnnnnnnnnnnnnnnnnnnnnnnnnnnnnnnnnnnnnnnnnnnnnnnnnnnnnnnnnnnnnnnnnnnnnnnnnnnnnnnnnnnnnnnnnnnnnnnnnnnnnnnnnnnnnnnnnnnnnnnnnnnnnnnnnnnnnnnnnnnnnnnnnnnnnnnnnnnnnnnnnnnnnnnnnnnnnnnnnnnnnnnnnnnnnnnnnnnnnnnnnnnnnnnnnnnnnnnnnnnnnnnnnnnnnnnnnnnnnnnnnnnnnnnnnnnnnnnnnnnnnnnnnnnnnnnnnnnnnnnnnnnnnnnnnnnnnnnnnnnnnnnnnnnnnnnnnnnnnnnnnnnnnnnnnnnnnnnnnnnnnnnnnnnnnnnnnnnnnnnnnnnnnnnnnnnnnnnnnnnnnnnnnnnnnnnnnnnnnnnnnnnnnnnnnnnnnnnnnnnnnnnnnnnnnnnnnnnnnnnnnnnnnnnnnnnnnnnnnnnnnnnnnnnnnnnnnnnnnnnnnnnnnnnnnnnnnnnnnnnnnnnnnnnnnnnnnnnnnnnnnnnnnnnnnnnnnnnnnnnnnnnnnnnnnnnnnnnnnnnnnnnnnnnnnnnnnnnnnnnnnnnnnnnnnnnnnnnnnnnnnnnnnnnnnnnnnnnnnnnnnnnnnnnnnnnnnnnnnnnnnnnnnnnnnnnnnnnnnnnnnnnnnnnnnnnnnnnnnnnnnnnnnnnnnnnnnnnnnnnnnnnnnnnnnnnnnnnnnnnnnnnnnnnnnnnnnnnnnnnnnnnnnnnnnnnnnnnnnnnnnnnnnnnnnnnnnnnnnnnnnnnnnnnnnnnnnnnnnnnnnnnnnnnnnnnnnnnnnnnnnnnnnnnnnnnnnnnnnnnnnnnnnnnnnnnnnnnnnnnnnnnnnnnnnnnnnnnnnnnnnnnnnnnnnnnnnnnnnnnnnnnnnnnnnnnnnnnnnnnnnnnnnnnnnnnnnnnnnnnnnnnnnnnnnnnnnnnnnnnnnnnnnnnnnnnnnnnnnnnnnnnnnnnnnnnnnnnnnnnnnnnnnnnnnnnnnnnnnnnnnnnnnnnnnnnnnnnnnnnnnnnnnnnnnnnnnnnnnnnnnnnnnnnnnnnnnnnnnnnnnnnnnnnnnnnnnnnnnnnnnnnnnnnnnnnnnnnnnnnnnnnnnnnnnnnnnnnnnnnnnnnnnnnnnnnnnnnnnnnnnnnnnnnnnnnnnnnnnnnnnnnnnnnnnnnnnnnnnnnnnnnnnnnnnnnnnnnnnnnnnnnnnnnnnnnnnnnnnnnnnnnnnnnnnnnnnnnnnnnnnnnnnnnnnnnnnnnnnnnnnnnnnnnnnnnnnnnnnnnnnnnnnnnnnnnnnnnnnnnnnnnnnnnnnnnnnnnnnnnnnnnnnnnnnnnnnnnnnnnnnnnnnnnnnnnnnnnnnnnnnnnnnnnnnnnnnnnnnnnnnnnnnnnnnnnnnnnnnnnnnnnnnnnnnnnnnnnnnnnnnnnnnnnnnnnnnnnnnnnnnnnnnnnnnnnnnnnnnnnnnnnnnnnnnnnnnnnnnnnnnnnnnnnnnnnnnnnnnnnnnnnnnnnnnnnnnnnnnnnnnnnnnnnnnnnnnnnnnnnnnnnnnnnnnnnnnnnnnnnnnnnnnnnnnnnnnnnnnnnnnnnnnnnnnnnnnnnnnnnnnnnnnnnnnnnnnnnnnnnnnnnnnnnnnnnnnnnnnnnnnnnnnnnnnnnnnnnnnnnnnnnnnnnnnnnnnnnnnnnnnnnnnnnnnnnnnnnnnnnnnnnnnnnnnnnnnnnnnnnnnnnnnnnnnnnnnnnnnnnnnnnnnnnnnnnnnnnnnnnnnnnnnnnnnnnnnnnnnnnnnnnnnnnnnnnnnnnnnnnnnnnnnnnnnnnnnnnnnnnnnnnnnnnnnnnnnnnnnnnnnnnnnnnnnnnnnnnnnnnnnnnnnnnnnnnnnnnnnnnnnnnnnnnnnnnnnnnnnnnnnnnnnnnnnnnnnnnnnnnnnnnnnnnnnnnnnnnnnnnnnnnnnnnnnnnnnnnnnnnnnnnnnnnnnnnnnnnnnnnnnnnnnnnnnnnnnnnnnnnnnnnnnnnnnnnnnnnnnnnnnnnnnnnnnnnnnnnnnnnnnnnnnnnnnnnnnnnnnnnnnnnnnnnnnnnnnnnnnnnnnnnnnnnnnnnnnnnnnnnnnnnnnnnnnnnnnnnnnnnnnnnnnnnnnnnnnnnnnnnnnnnnnnnnnnnnnnnnnnnnnnnnnnnnnnnnnnnnnnnnnnnnnnnnnnnnnnnnnnnnnnnnnnnnnnnnnnnnnnnnnnnnnnnnnnnnnnnnnnnnnnnnnnnnnnnnnnnnnnnnnnnnnnnnnnnnnnnnnnnnnnnnnnnnnnnnnnnnnnnnnnnnnnnnnnnnnnnnnnnnnnnnnnnnnnnnnnnnnnnnnnnnnnnnnnnnnnnnnnnnnnnnnnnnnnnnnnnnnnnnnnnnnnnnnnnnnnnnnnnnnnnnnnnnnnnnnnnnnnnnnnnnnnnnnnnnnnnnnnnnnnnnnnnnnnnnnnnnnnnnnnnnnnnnnnnnnnnnnnnnnnnnnnnnnnnnnnnnnnnnnnnnnnnnnnnnnnnnnnnnnnnnnnnnnnnnnnnnnnnnnnnnnnnnnnnnnnnnnnnnnnnnnnnnnnnnnnnnnnnnnnnnnnnnnnnnnnnnnnnnnnnnnnnnnnnnnnnnnnnnnnnnnnnnnnnnnnnnnnnnnnnnnnnnnnnnnnnnnnnnnnnnnnnnnnnnnnnnnnnnnnnnnnnnnnnnnnnnnnnnnnnnnnnnnnnnnnnnnnnnnnnnnnnnnnnnnnnnnnnnnnnnnnnnnnnnnnnnnnnnnnnnnnnnnnnnnnnnnnnnnnnnnnnnnnnnnnnnnnnnnnnnnnnnnnnnnnnnnnnnnnnnnnnnnnnnnnnnnnnnnnnnnnnnnnnnnnnnnnnnnnnnnnnnnnnnnnnnnnnnnnnnnnnnnnnnnnnnnnnnnnnnnnnnnnnnnnnnnnnnnnnnnnnnnnnnnnnnnnnnnnnnnnnnnnnnnnnnnnnnnnnnnnnnnnnnnnnnnnnnnnnnnnnnnnnnnnnnnnnnnnnnnnnnnnnnnnnnnnnnnnnnnnnnnnnnnnnnnnnnnnnnnnnnnnnnnnnnnnnnnnnnnnnnnnnnnnnnnnnnnnnnnnnnnnnnnnnnnnnnnnnnnnnnnnnnnnnnnnnnnnnnnnnnnnnnnnnnnnnnnnnnnnnnnnnnnnnnnnnnnnnnnnnnnnnnnnnnnnnnnnnnnnnnnnnnnnnnnnnnnnnnnnnnnnnnnnnnnnnnnnnnnnnnnnnnnnnnnnnnnnnnnnnnnnnnnnnnnnnnnnnnnnnnnnnnnnnnnnnnnnnnnnnnnnnnnnnnnnnnnnnnnnnnnnnnnnnnnnnnnnnnnnnnnnnnnnnnnnnnnnnnnnnnnnnnnnnnnnnnnnnnnnnnnnnnnnnnnnnnnnnnnnnnnnnnnnnnnnnnnnnnnnnnnnnnnnnnnnnnnnnnnnnnnnnnnnnnnnnnnnnnnnnnnnnnnnnnnnnnnnnnnnnnnnnnnnnnnnnnnnnnnnnnnnnnnnnnnnnnnnnnnnnnnnnnnnnnnnnnnnnnnnnnnnnnnnnnnnnnnnnnnnnnnnnnnnnnnnnnnnnnnnnnnnnnnnnnnnnnnnnnnnnnnnnnnnnnnnnnnnnnnnnnnnnnnnnnnnnnnnnnnnnnnnnnnnnnnnnnnnnnnnnnnnnnnnnnnnnnnnnnnnnnnnnnnnnnnnnnnnnnnnnnnnnnnnnnnnnnnnnnnnnnnnnnnnnnnnnnnnnnnnnnnnnnnnnnnnnnnnnnnnnnnnnnnnnnnnnnnnnnnnnnnnnnnnnnnnnnnnnnnnnnnnnnnnnnnnnnnnnnnnnnnnnnnnnnnnnnnnnnnnnnnnnnnnnnnnnnnnnnnnnnnnnnnnnnnnnnnnnnnnnnnnnnnnnnnnnnnnnnnnnnnnnnnnnnnnnnnnnnnnnnnnnnnnnnnnnnnnnnnnnnnnnnnnnnnnnnnnnnnnnnnnnnnnnnnnnnnnnnnnnnnnnnnnnnnnnnnnnnnnnnnnnnnnnnnnnnnnnnnnnnnnnnnnnnnnnnnnnnnnnnnnnnnnnnnnnnnnnnnnnnnnnnnnnnnnnnnnnnnnnnnnnnnnnnnnnnnnnnnnnnnnnnnnnnnnnnnnnnnnnnnnnnnnnnnnnnnnnnnnnnnnnnnnnnnnnnnnnnnnnnnnnnnnnnnnnnnnnnnnnnnnnnnnnnnnnnnnnnnnnnnnnnnnnnnnnnnnnnnnnnnnnnnnnnnnnnnnnnnnnnnnnnnnnnnnnnnnnnnnnnnnnnnnnnnnnnnnnnnnnnnnnnnnnnnnnnnnnnnnnnnnnnnnnnnnnnnnnnnnnnnnnnnnnnnnnnnnnnnnnnnnnnnnnnnnnnnnnnnnnnnnnnnnnnnnnnnnnnnnnnnnnnnnnnnnnnnnnnnnnnnnnnnnnnnnnnnnnnnnnnnnnnnnnnnnnnnnnnnnnnnnnnnnnnnnnnnnnnnnnnnnnnnnnnnnnnnnnnnnnnnnnnnnnnnnnnnnnnnnnnnnnnnnnnnnnnnnnnnnnnnnnnnnnnnnnnnnnnnnnnnnnnnnnnnnnnnnnnnnnnnnnnnnnnnnnnnnnnnnnnnnnnnnnnnnnnnnnnnnnnnnnnnnnnnnnnnnnnnnnnnnnnnnnnnnnnnnnnnnnnnnnnnnnnnnnnnnnnnnnnnnnnnnnnnnnnnnnnnnnnnnnnnnnnnnnnnnnnnnnnnnnnnnnnnnnnnnnnnnnnnnnnnnnnnnnnnnnnnnnnnnnnnnnnnnnnnnnnnnnnnnnnnnnnnnnnnnnnnnnnnnnnnnnnnnnnnnnnnnnnnnnnnnnnnnnnnnnnnnnnnnnnnnnnnnnnnnnnnnnnnnnnnnnnnnnnnnnnnnnnnnnnnnnnnnnnnnnnnnnnnnnnnnnnnnnnnnnnnnnnnnnnnnnnnnnnnnnnnnnnnnnnnnnnnnnnnnnnnnnnnnnnnnnnnnnnnnnnnnnnnnnnnnnnnnnnnnnnnnnnnnnnnnnnnnnnnnnnnnnnnnnnnnnnnnnnnnnnnnnnnnnnnnnnnnnnnnnnnnnnnnnnnnnnnnnnnnnnnnnnnnnnnnnnnnnnnnnnnnnnnnnnnnnnnnnnnnnnnnnnnnnnnnnnnnnnnnnnnnnnnnnnnnnnnnnnnnnnnnnnnnnnnnnnnnnnnnnnnnnnnnnnnnnnnnnnnnnnnnnnnnnnnnnnnnnnnnnnnnnnnnnnnnnnnnnnnnnnnnnnnnnnnnnnnnnnnnnnnnnnnnnnnnnnnnnnnnnnnnnnnnnnnnnnnnnnnnnnnnnnnnnnnnnnnnnnnnnnnnnnnnnnnnnnnnnnnnnnnnnnnnnnnnnnnnnnnnnnnnnnnnnnnnnnnnnnnnnnnnnnnnnnnnnnnnnnnnnnnnnnnnnnnnnnnnnnnnnnnnnnnnnnnnnnnnnnnnnnnnnnnnnnnnnnnnnnnnnnnnnnnnnnnnnnnnnnnnnnnnnnnnnnnnnnnnnnnnnnnnnnnnnnnnnnnnnnnnnnnnnnnnnnnnnnnnnnnnnnnnnnnnnnnnnnnnnnnnnnnnnnnnnnnnnnnnnnnnnnnnnnnnnnnnnnnnnnnnnnnnnnnnnnnnnnnnnnnnnnnnnnnnnnnnnnnnnnnnnnnnnnnnnnnnnnnnnnnnnnnnnnnnnnnnnnnnnnnnnnnnnnnnnnnnnnnnnnnnnnnnnnnnnnnnnnnnnnnnnnnnnnnnnnnnnnnnnnnnnnnnnnnnnnnnnnnnnnnnnnnnnnnnnnnnnnnnnnnnnnnnnnnnnnnnnnnnnnnnnnnnnnnnnnnnnnnnnnnnnnnnnnnnnnnnnnnnnnnnnnnnnnnnnnnnnnnnnnnnnnnnnnnnnnnnnnnnnnnnnnnnnnnnnnnnnnnnnnnnnnnnnnnnnnnnnnnnnnnnnnnnnnnnnnnnnnnnnnnnnnnnnnnnnnnnnnnnnnnnnnnnnnnnnnnnnnnnnnnnnnnnnnnnnnnnnnnnnnnnnnnnnnnnnnnnnnnnnnnnnnnnnnnnnnnnnnnnnnnnnnnnnnnnnnnnnnnnnnnnnnnnnnnnnnnnnnnnnnnnnnnnnnnnnnnnnnnnnnnnnnnnnnnnnnnnnnnnnnnnnnnnnnnnnnnnnnnnnnnnnnnnnnnnnnnnnnnnnnnnnnnnnnnnnnnnnnnnnnnnnnnnnnnnnnnnnnnnnnnnnnnnnnnnnnnnnnnnnnnnnnnnnnnnnnnnnnnnnnnnnnnnnnnnnnnnnnnnnnnnnnnnnnnnnnnnnnnnnnnnnnnnnnnnnnnnnnnnnnnnnnnnnnnnnnnnnnnnnnnnnnnnnnnnnnnnnnnnnnnnnnnnnnnnnnnnnnnnnnnnnnnnnnnnnnnnnnnnnnnnnnnnnnnnnnnnnnnnnnnnnnnnnnnnnnnnnnnnnnnnnnnnnnnnnnnnnnnnnnnnnnnnnnnnnnnnnnnnnnnnnnnnnnnnnnnnnnnnnnnnnnnnnnnnnnnnnnnnnnnnnnnnnnnnnnnnnnnnnnnnnnnnnnnnnnnnnnnnnnnnnnnnnnnnnnnnnnnnnnnnnnnnnnnnnnnnnnnnnnnnnnnnnnnnnnnnnnnnnnnnnnnnnnnnnnnnnnnnnnnnnnnnnnnnnnnnnnnnnnnnnnnnnnnnnnnnnnnnnnnnnnnnnnnnnnnnnnnnnnnnnnnnnnnnnnnnnnnnnnnnnnnnnnnnnnnnnnnnnnnnnnnnnnnnnnnnnnnnnnnnnnnnnnnnnnnnnnnnnnnnnnnnnnnnnnnnnnnnnnnnnnnnnnnnnnnnnnnnnnnnnnnnnnnnnnnnnnnnnnnnnnnnnnnnnnnnnnnnnnnnnnnnnnnnnnnnnnnnnnnnnnnnnnnnnnnnnnnnnnnnnnnnnnnnnnnnnnnnnnnnnnnnnnnnnnnnnnnnnnnnnnnnnnnnnnnnnnnnnnnnnnnnnnnnnnnnnnnnnnnnnnnnnnnnnnnnnnnnnnnnnnnnnnnnnnnnnnnnnnnnnnnnnnnnnnnnnnnnnnnnnnnnnnnnnnnnnnnnnnnnnnnnnnnnnnnnnnnnnnnnnnnnnnnnnnnnnnnnnnnnnnnnnnnnnnnnnnnnnnnnnnnnnnnnnnnnnnnnnnnnnnnnnnnnnnnnnnnnnnnnnnnnnnnnnnnnnnnnnnnnnnnnnnnnnnnnnnnnnnnnnnnnnnnnnnnnnnnnnnnnnnnnnnnnnnnnnnnnnnnnnnnnnnnnnnnnnnnnnnnnnnnnnnnnnnnnnnnnnnnnnnnnnnnnnnnnnnnnnnnnnnnnnnnnnnnnnnnnnnnnnnnnnnnnnnnnnnnnnnnnnnnnnnnnnnnnnnnnnnnnnnnnnnnnnnnnnnnnnnnnnnnnnnnnnnnnnnnnnnnnnnnnnnnnnnnnnnnnnnnnnnnnnnnnnnnnnnnnnnnnnnnnnnnnnnnnnnnnnnnnnnnnnnnnnnnnnnnnnnnnnnnnnnnnnnnnnnnnnnnnnnnnnnnnnnnnnnnnnnnnnnnnnnnnnnnnnnnnnnnnnnnnnnnnnnnnnnnnnnnnnnnnnnnnnnnnnnnnnnnnnnnnnnnnnnnnnnnnnnnnnnnnnnnnnnnnnnnnnnnnnnnnnnnnnnnnnnnnnnnnnnnnnnnnnnnnnnnnnnnnnnnnnnnnnnnnnnnnnnnnnnnnnnnnnnnnnnnnnnnnnnnnnnnnnnnnnnnnnnnnnnnnnnnnnnnnnnnnnnnnnnnnnnnnnnnnnnnnnnnnnnnnnnnnnnnnnnnnnnnnnnnnnnnnnnnnnnnnnnnnnnnnnnnnnnnnnnnnnnnnnnnnnnnnnnnnnnnnnnnnnnnnnnnnnnnnnnnnnnnnnnnnnnnnnnnnnnnnnnnnnnnnnnnnnnnnnnnnnnnnnnnnnnnnnnnnnnnnnnnnnnnnnnnnnnnnnnnnnnnnnnnnnnnnnnnnnnnnnnnnnnnnnnnnnnnnnnnnnnnnnnnnnnnnnnnnnnnnnnnnnnnnnnnnnnnnnnnnnnnnnnnnnnnnnnnnnnnnnnnnnnnnnnnnnnnnnnnnnnnnnnnnnnnnnnnnnnnnnnnnnnnnnnnnnnnnnnnnnnnnnnnnnnnnnnnnnnnnnnnnnnnnnnnnnnnnnnnnnnnnnnnnnnnnnnnnnnnnnnnnnnnnnnnnnnnnnnnnnnnnnnnnnnnnnnnnnnnnnnnnnnnnnnnnnnnnnnnnnnnnnnnnnnnnnnnnnnnnnnnnnnnnnnnnnnnnnnnnnnnnnnnnnnnnnnnnnnnnnnnnnnnnnnnnnnnnnnnnnnnnnnnnnnnnnnnnnnnnnnnnnnnnnnnnnnnnnnnnnnnnnnnnnnnnnnnnnnnnnnnnnnnnnnnnnnnnnnnnnnnnnnnnnnnnnnnnnnnnnnnnnnnnnnnnnnnnnnnnnnnnnnnnnnnnnnnnnnnnnnnnnnnnnnnnnnnnnnnnnnnnnnnnnnnnnnnnnnnnnnnnnnnnnnnnnnnnnnnnnnnnnnnnnnnnnnnnnnnnnnnnnnnnnnnnnnnnnnnnnnnnnnnnnnnnnnnnnnnnnnnnnnnnnnnnnnnnnnnnnnnnnnnnnnnnnnnnnnnnnnnnnnnnnnnnnnnnnnnnnnnnnnnnnnnnnnnnnnnnnnnnnnnnnnnnnnnnnnnnnnnnnnnnnnnnnnnnnnnnnnnnnnnnnnnnnnnnnnnnnnnnnnnnnnnnnnnnnnnnnnnnnnnnnnnnnnnnnnnnnnnnnnnnnnnnnnnnnnnnnnnnnnnnnnnnnnnnnnnnnnnnnnnnnnnnnnnnnnnnnnnnnnnnnnnnnnnnnnnnnnnnnnnnnnnnnnnnnnnnnnnnnnnnnnnnnnnnnnnnnnnnnnnnnnnnnnnnnnnnnnnnnnnnnnnnnnnnnnnnnnnnnnnnnnnnnnnnnnnnnnnnnnnnnnnnnnnnnnnnnnnnnnnnnnnnnnnnnnnnnnnnnnnnnnnnnnnnnnnnnnnnnnnnnnnnnnnnnnnnnnnnnnnnnnnnnnnnnnnnnnnnnnnnnnnnnnnnnnnnnnnnnnnnnnnnnnnnnnnnnnnnnnnnnnnnnnnnnnnnnnnnnnnnnnnnnnnnnnnnnnnnnnnnnnnnnnnnnnnnnnnnnnnnnnnnnnnnnnnnnnnnnnnnnnnnnnnnnnnnnnnnnnnnnnnnnnnnnnnnnnnnnnnnnnnnnnnnnnnnnnnnnnnnnnnnnnnnnnnnnnnnnnnnnnnnnnnnnnnnnnnnnnnnnnnnnnnnnnnnnnnnnnnnnnnnnnnnnnnnnnnnnnnnnnnnnnnnnnnnnnnnnnnnnnnnnnnnnnnnnnnnnnnnnnnnnnnnnnnnnnnnnnnnnnnnnnnnnnnnnnnnnnnnnnnnnnnnnnnnnnnnnnnnnnnnnnnnnnnnnnnnnnnnnnnnnnnnnnnnnnnnnnnnnnnnnnnnnnnnnnnnnnnnnnnnnnnnnnnnnnnnnnnnnnnnnnnnnnnnnnnnnnnnnnnnnnnnnnnnnnnnnnnnnnnnnnnnnnnnnnnnnnnnnnnnnnnnnnnnnnnnnnnnnnnnnnnnnnnnnnnnnnnnnnnnnnnnnnnnnnnnnnnnnnnnnnnnnnnnnnnnnnnnnnnnnnnnnnnnnnnnnnnnnnnnnnnnnnnnnnnnnnnnnnnnnnnnnnnnnnnnnnnnnnnnnnnnnnnnnnnnnnnnnnnnnnnnnnnnnnnnnnnnnnnnnnnnnnnnnnnnnnnnnnnnnnnnnnnnnnnnnnnnnnnnnnnnnnnnnnnnnnnnnnnnnnnnnnnnnnnnnnnnnnnnnnnnnnnnnnnnnnnnnnnnnnnnnnnnnnnnnnnnnnnnnnnnnnnnnnnnnnnnnnnnnnnnnnnnnnnnnnnnnnnnnnnnnnnnnnnnnnnnnnnnnnnnnnnnnnnnnnnnnnnnnnnnnnnnnnnnnnnnnnnnnnnnnnnnnnnnnnnnnnnnnnnnnnnnnnnnnnnnnnnnnnnnnnnnnnnnnnnnnnnnnnnnnnnnnnnnnnnnnnnnnnnnnnnnnnnnnnnnnnnnnnnnnnnnnnnnnnnnnnnnnnnnnnnnnnnnnnnnnnnnnnnnnnnnnnnnnnnnnnnnnnnnnnnnnnnnnnnnnnnnnnnnnnnnnnnnnnnnnnnnnnnnnnnnnnnnnnnnnnnnnnnnnnnnnnnnnnnnnnnnnnnnnnnnnnnnnnnnnnnnnnnnnnnnnnnnnnnnnnnnnnnnnnnnnnnnnnnnnnnnnnnnnnnnnnnnnnnnnnnnnnnnnnnnnnnnnnnnnnnnnnnnnnnnnnnnnnnnnnnnnnnnnnnnnnnnnnnnnnnnnnnnnnnnnnnnnnnnnnnnnnnnnnnnnnnnnnnnnnnnnnnnnnnnnnnnnnnnnnnnnnnnnnnnnnnnnnnnnnnnnnnnnnnnnnnnnnnnnnnnnnnnnnnnnnnnnnnnnnnnnnnnnnnnnnnnnnnnnnnnnnnnnnnnnnnnnnnnnnnnnnnnnnnnnnnnnnnnnnnnnnnnnnnnnnnnnnnnnnnnnnnnnnnnnnnnnnnnnnnnnnnnnnnnnnnnnnnnnnnnnnnnnnnnnnnnnnnnnnnnnnnnnnnnnnnnnnnnnnnnnnnnnnnnnnnnnnnnnnnnnnnnnnnnnnnnnnnnnnnnnnnnnnnnnnnnnnnnnnnnnnnnnnnnnnnnnnnnnnnnnnnnnnnnnnnnnnnnnnnnnnnnnnnnnnnnnnnnnnnnnnnnnnnnnnnnnnnnnnnnnnnnnnnnnnnnnnnnnnnnnnnnnnnnnnnnnnnnnnnnnnnnnnnnnnnnnnnnnnnnnnnnnnnnnnnnnnnnnnnnnnnnnnnnnnnnnnnnnnnnnnnnnnnnnnnnnnnnnnnnnnnnnnnnnnnnnnnnnnnnnnnnnnnnnnnnnnnnnnnnnnnnnnnnnnnnnnnnnnnnnnnnnnnnnnnnnnnnnnnnnnnnnnnnnnnnnnnnnnnnnnnnnnnnnnnnnnnnnnnnnnnnnnnnnnnnnnnnnnnnnnnnnnnnnnnnnnnnnnnnnnnnnnnnnnnnnnnnnnnnnnnnnnnnnnnnnnnnnnnnnnnnnnnnnnnnnnnnnnnnnnnnnnnnnnnnnnnnnnnnnnnnnnnnnnnnnnnnnnnnnnnnnnnnnnnnnnnnnnnnnnnnnnnnnnnnnnnnnnnnnnnnnnnnnnnnnnnnnnnnnnnnnnnnnnnnnnnnnnnnnnnnnnnnnnnnnnnnnnnnnnnnnnnnnnnnnnnnnnnnnnnnnnnnnnnnnnnnnnnnnnnnnnnnnnnnnnnnnnnnnnnnnnnnnnnnnnnnnnnnnnnnnnnnnnnnnnnnnnnnnnnnnnnnnnnnnnnnnnnnnnnnnnnnnnnnnnnnnnnnnnnnnnnnnnnnnnnnnnnnnnnnnnnnnnnnnnnnnnnnnnnnnnnnnnnnnnnnnnnnnnnnnnnnnnnnnnnnnnnnnnnnnnnnnnnnnnnnnnnnnnnnnnnnnnnnnnnnnnnnnnnnnnnnnnnnnnnnnnnnnnnnnnnnnnnnnnnnnnnnnnnnnnnnnnnnnnnnnnnnnnnnnnnnnnnnnnnnnnnnnnnnnnnnnnnnnnnnnnnnnnnnnnnnnnnnnnnnnnnnnnnnnnnnnnnnnnnnnnnnnnnnnnnnnnnnnnnnnnnnnnnnnnnnnnnnnnnnnnnnnnnnnnnnnnnnnnnnnnnnnnnnnnnnnnnnnnnnnnnnnnnnnnnnnnnnnnnnnnnnnnnnnnnnnnnnnnnnnnnnnnnnnnnnnnnnnnnnnnnnnnnnnnnnnnnnnnnnnnnnnnnnnnnnnnnnnnnnnnnnnnnnnnnnnnnnnnnnnnnnnnnnnnnnnnnnnnnnnnnnnnnnnnnnnnnnnnnnnnnnnnnnnnnnnnnnnnnnnnnnnnnnnnnnnnnnnnnnnnnnnnnnnnnnnnnnnnnnnnnnnnnnnnnnnnnnnnnnnnnnnnnnnnnnnnnnnnnnnnnnnnnnnnnnnnnnnnnnnnnnnnnnnnnnnnnnnnnnnnnnnnnnnnnnnnnnnnnnnnnnnnnnnnnnnnnnnnnnnnnnnnnnnnnnnnnnnnnnnnnnnnnnnnnnnnnnnnnnnnnnnnnnnnnnnnnnnnnnnnnnnnnnnnnnnnnnnnnnnnnnnnnnnnnnnnnnnnnnnnnnnnnnnnnnnnnnnnnnnnnnnnnnnnnnnnnnnnnnnnnnnnnnnnnnnnnnnnnnnnnnnnnnnnnnnnnnnnnnnnnnnnnnnnnnnnnnnnnnnnnnnnnnnnnnnnnnnnnnnnnnnnnnnnnnnnnnnnnnnnnnnnnnnnnnnnnnnnnnnnnnnnnnnnnnnnnnnnnnnnnnnnnnnnnnnnnnnnnnnnnnnnnnnnnnnnnnnnnnnnnnnnnnnnnnnnnnnnnnnnnnnnnnnnnnnnnnnnnnnnnnnnnnnnnnnnnnnnnnnnnnnnnnnnnnnnnnnnnnnnnnnnnnnnnnnnnnnnnnnnnnnnnnnnnnnnnnnnnnnnnnnnnnnnnnnnnnnnnnnnnnnnnnnnnnnnnnnnnnnnnnnnnnnnnnnnnnnnnnnnnnnnnnnnnnnnnnnnnnnnnnnnnnnnnnnnnnnnnnnnnnnnnnnnnnnnnnnnnnnnnnnnnnnnnnnnnnnnnnnnnnnnnnnnnnnnnnnnnnnnnnnnnnnnnnnnnnnnnnnnnnnnnnnnnnnnnnnnnnnnnnnnnnnnnnnnnnnnnnnnnnnnnnnnnnnnnnnnnnnnnnnnnnnnnnnnnnnnnnnnnnnnnnnnnnnnnnnnnnnnnnnnnnnnnnnnnnnnnnnnnnnnnnnnnnnnnnnnnnnnnnnnnnnnnnnnnnnnnnnnnnnnnnnnnnnnnnnnnnnnnnnnnnnnnnnnnnnnnnnnnnnnnnnnnnnnnnnnnnnnnnnnnnnnnnnnnnnnnnnnnnnnnnnnnnnnnnnnnnnnnnnnnnnnnnnnnnnnnnnnnnnnnnnnnnnnnnnnnnnnnnnnnnnnnnnnnnnnnnnnnnnnnnnnnnnnnnnnnnnnnnnnnnnnnnnnnnnnnnnnnnnnnnnnnnnnnnnnnnnnnnnnnnnnnnnnnnnnnnnnnnnnnnnnnnnnnnnnnnnnnnnnnnnnnnnnnnnnnnnnnnnnnnnnnnnnnnnnnnnnnnnnnnnnnnnnnnnnnnnnnnnnnnnnnnnnnnnnnnnnnnnnnnnnnnnnnnnnnnnnnnnnnnnnnnnnnnnnnnnnnnnnnnnnnnnnnnnnnnnnnnnnnnnnnnnnnnnnnnnnnnnnnnnnnnnnnnnnnnnnnnnnnnnnnnnnnnnnnnnnnnnnnnnnnnnnnnnnnnnnnnnnnnnnnnnnnnnnnnnnnnnnnnnnnnnnnnnnnnnnnnnnnnnnnnnnnnnnnnnnnnnnnnnnnnnnnnnnnnnnnnnnnnnnnnnnnnnnnnnnnnnnnnnnnnnnnnnnnnnnnnnnnnnnnnnnnnnnnnnnnnnnnnnnnnnnnnnnnnnnnnnnnnnnnnnnnnnnnnnnnnnnnnnnnnnnnnnnnnnnnnnnnnnnnnnnnnnnnnnnnnnnnnnnnnnnnnnnnnnnnnnnnnnnnnnnnnnnnnnnnnnnnnnnnnnnnnnnnnnnnnnnnnnnnnnnnnnnnnnnnnnnnnnnnnnnnnnnnnnnnnnnnnnnnnnnnnnnnnnnnnnnnnnnnnnnnnnnnnnnnnnnnnnnnnnnnnnnnnnnnnnnnnnnnnnnnnnnnnnnnnnnnnnnnnnnnnnnnnnnnnnnnnnnnnnnnnnnnnnnnnnnnnnnnnnnnnnnnnnnnnnnnnnnnnnnnnnnnnnnnnnnnnnnnnnnnnnnnnnnnnnnnnnnnnnnnnnnnnnnnnnnnnnnnnnnnnnnnnnnnnnnnnnnnnnnnnnnnnnnnnnnnnnnnnnnnnnnnnnnnnnnnnnnnnnnnnnnnnnnnnnnnnnnnnnnnnnnnnnnnnnnnnnnnnnnnnnnnnnnnnnnnnnnnnnnnnnnnnnnnnnnnnnnnnnnnnnnnnnnnnnnnnnnnnnnnnnnnnnnnnnnnnnnnnnnnnnnnnnnnnnnnnnnnnnnnnnnnnnnnnnnnnnnnnnnnnnnnnnnnnnnnnnnnnnnnnnnnnnnnnnnnnnnnnnnnnnnnnnnnnnnnnnnnnnnnnnnnnnnnnnnnnnnnnnnnnnnnnnnnnnnnnnnnnnnnnnnnnnnnnnnnnnnnnnnnnnnnnnnnnnnnnnnnnnnnnnnnnnnnnnnnnnnnnnnnnnnnnnnnnnnnnnnnnnnnnnnnnnnnnnnnnnnnnnnnnnnnnnnnnnnnnnnnnnnnnnnnnnnnnnnnnnnnnnnnnnnnnnnnnnnnnnnnnnnnnnnnnnnnnnnnnnnnnnnnnnnnnnnnnnnnnnnnnnnnnnnnnnnnnnnnnnnnnnnnnnnnnnnnnnnnnnnnnnnnnnnnnnnnnnnnnnnnnnnnnnnnnnnnnnnnnnnnnnnnnnnnnnnnnnnnnnnnnnnnnnnnnnnnnnnnnnnnnnnnnnnnnnnnnnnnnnnnnnnnnnnnnnnnnnnnnnnnnnnnnnnnnnnnnnnnnnnnnnnnnnnnnnnnnnnnnnnnnnnnnnnnnnnnnnnnnnnnnnnnnnnnnnnnnnnnnnnnnnnnnnnnnnnnnnnnnnnnnnnnnnnnnnnnnnnnnnnnnnnnnnnnnnnnnnnnnnnnnnnnnnnnnnnnnnnnnnnnnnnnnnnnnnnnnnnnnnnnnnnnnnnnnnnnnnnnnnnnnnnnnnnnnnnnnnnnnnnnnnnnnnnnnnnnnnnnnnnnnnnnnnnnnnnnnnnnnnnnnnnnnnnnnnnnnnnnnnnnnnnnnnnnnnnnnnnnnnnnnnnnnnnnnnnnnnnnnnnnnnnnnnnnnnnnnnnnnnnnnnnnnnnnnnnnnnnnnnnnnnnnnnnnnnnnnnnnnnnnnnnnnnnnnnnnnnnnnnnnnnnnnnnnnnnnnnnnnnnnnnnnnnnnnnnnnnnnnnnnnnnnnnnnnnnnnnnnnnnnnnnnnnnnnnnnnnnnnnnnnnnnnnnnnnnnnnnnnnnnnnnnnnnnnnnnnnnnnnnnnnnnnnnnnnnnnnnnnnnnnnnnnnnnnnnnnnnnnnnnnnnnnnnnnnnnnnnnnnnnnnnnnnnnnnnnnnnnnnnnnnnnnnnnnnnnnnnnnnnnnnnnnnnnnnnnnnnnnnnnnnnnnnnnnnnnnnnnnnnnnnnnnnnnnnnnnnnnnnnnnnnnnnnnnnnnnnnnnnnnnnnnnnnnnnnnnnnnnnnnnnnnnnnnnnnnnnnnnnnnnnnnnnnnnnnnnnnnnnnnnnnnnnnnnnnnnnnnnnnnnnnnnnnnnnnnnnnnnnnnnnnnnnnnnnnnnnnnnnnnnnnnnnnnnnnnnnnnnnnnnnnnnnnnnnnnnnnnnnnnnnnnnnnnnnnnnnnnnnnnnnnnnnnnnnnnnnnnnnnnnnnnnnnnnnnnnnnnnnnnnnnnnnnnnnnnnnnnnnnnnnnnnnnnnnnnnnnnnnnnnnnnnnnnnnnnnnnnnnnnnnnnnnnnnnnnnnnnnnnnnnnnnnnnnnnnnnnnnnnnnnnnnnnnnnnnnnnnnnnnnnnnnnnnnnnnnnnnnnnnnnnnnnnnnnnnnnnnnnnnnnnnnnnnnnnnnnnnnnnnnnnnnnnnnnnnnnnnnnnnnnnnnnnnnnnnnnnnnnnnnnnnnnnnnnnnnnnnnnnnnnnnnnnnnnnnnnnnnnnnnnnnnnnnnnnnnnnnnnnnnnnnnnnnnnnnnnnnnnnnnnnnnnnnnnnnnnnnnnnnnnnnnnnnnnnnnnnnnnnnnnnnnnnnnnnnnnnnnnnnnnnnnnnnnnnnnnnnnnnnnnnnnnnnnnnnnnnnnnnnnnnnnnnnnnnnnnnnnnnnnnnnnnnnnnnnnnnnnnnnnnnnnnnnnnnnnnnnnnnnnnnnnnnnnnnnnnnnnnnnnnnnnnnnnnnnnnnnnnnnnnnnnnnnnnnnnnnnnnnnnnnnnnnnnnnnnnnnnnnnnnnnnnnnnnnnnnnnnnnnnnnnnnnnnnnnnnnnnnnnnnnnnnnnnnnnnnnnnnnnnnnnnnnnnnnnnnnnnnnnnnnnnnnnnnnnnnnnnnnnnnnnnnnnnnnnnnnnnnnnnnnnnnnnnnnnnnnnnnnnnnnnnnnnnnnnnnnnnnnnnnnnnnnnnnnnnnnnnnnnnnnnnnnnnnnnnnnnnnnnnnnnnnnnnnnnnnnnnnnnnnnnnnnnnnnnnnnnnnnnnnnnnnnnnnnnnnnnnnnnnnnnnnnnnnnnnnnnnnnnnnnnnnnnnnnnnnnnnnnnnnnnnnnnnnnnnnnnnnnnnnnnnnnnnnnnnnnnnnnnnnnnnnnnnnnnnnnnnnnnnnnnnnnnnnnnnnnnnnnnnnnnnnnnnnnnnnnnnnnnnnnnnnnnnnnnnnnnnnnnnnnnnnnnnnnnnnnnnnnnnnnnnnnnnnnnnnnnnnnnnnnnnnnnnnnnnnnnnnnnnnnnnnnnnnnnnnnnnnnnnnnnnnnnnnnnnnnnnnnnnnnnnnnnnnnnnnnnnnnnnnnnnnnnnnnnnnnnnnnnnnnnnnnnnnnnnnnnnnnnnnnnnnnnnnnnnnnnnnnnnnnnnnnnnnnnnnnnnnnnnnnnnnnnnnnnnnnnnnnnnnnnnnnnnnnnnnnnnnnnnnnnnnnnnnnnnnnnnnnnnnnnnnnnnnnnnnnnnnnnnnnnnnnnnnnnnnnnnnnnnnnnnnnnnnnnnnnnnnnnnnnnnnnnnnnnnnnnnnnnnnnnnnnnnnnnnnnnnnnnnnnnnnnnnnnnnnnnnnnnnnnnnnnnnnnnnnnnnnnnnnnnnnnnnnnnnnnnnnnnnnnnnnnnnnnnnnnnnnnnnnnnnnnnnnnnnnnnnnnnnnnnnnnnnnnnnnnnnnnnnnnnnnnnnnnnnnnnnnnnnnnnnnnnnnnnnnnnnnnnnnnnnnnnnnnnnnnnnnnnnnnnnnnnnnnnnnnnnnnnnnnnnnnnnnnnnnnnnnnnnnnnnnnnnnnnnnnnnnnnnnnnnnnnnnnnnnnnnnnnnnnnnnnnnnnnnnnnnnnnnnnnnnnnnnnnnnnnnnnnnnnnnnnnnnnnnnnnnnnnnnnnnnnnnnnnnnnnnnnnnnnnnnnnnnnnnnnnnnnnnnnnnnnnnnnnnnnnnnnnnnnnnnnnnnnnnnnnnnnnnnnnnnnnnnnnnnnnnnnnnnnnnnnnnnnnnnnnnnnnnnnnnnnnnnnnnnnnnnnnnnnnnnnnnnnnnnnnnnnnnnnnnnnnnnnnnnnnnnnnnnnnnnnnnnnnnnnnnnnnnnnnnnnnnnnnnnnnnnnnnnnnnnnnnnnnnnnnnnnnnnnnnnnnnnnnnnnnnnnnnnnnnnnnnnnnnnnnnnnnnnnnnnnnnnnnnnnnnnnnnnnnnnnnnnnnnnnnnnnnnnnnnnnnnnnnnnnnnnnnnnnnnnnnnnnnnnnnnnnnnnnnnnnnnnnnnnnnnnnnnnnnnnnnnnnnnnnnnnnnnnnnnnnnnnnnnnnnnnnnnnnnnnnnnnnnnnnnnnnnnnnnnnnnnnnnnnnnnnnnnnnnnnnnnnnnnnnnnnnnnnnnnnnnnnnnnnnnnnnnnnnnnnnnnnnnnnnnnnnnnnnnnnnnnnnnnnnnnnnnnnnnnnnnnnnnnnnnnnnnnnnnnnnnnnnnnnnnnnnnnnnnnnnnnnnnnnnnnnnnnnnnnnnnnnnnnnnnnnnnnnnnnnnnnnnnnnnnnnnnnnnnnnnnnnnnnnnnnnnnnnnnnnnnnnnnnnnnnnnnnnnnnnnnnnnnnnnnnnnnnnnnnnnnnnnnnnnnnnnnnnnnnnnnnnnnnnnnnnnnnnnnnnnnnnnnnnnnnnnnnnnnnnnnnnnnnnnnnnnnnnnnnnnnnnnnnnnnnnnnnnnnnnnnnnnnnnnnnnnnnnnnnnnnnnnnnnnnnnnnnnnnnnnnnnnnnnnnnnnnnnnnnnnnnnnnnnnnnnnnnnnnnnnnnnnnnnnnnnnnnnnnnnnnnnnnnnnnnnnnnnnnnnnnnnnnnnnnnnnnnnnnnnnnnnnnnnnnnnnnnnnnnnnnnnnnnnnnnnnnnnnnnnnnnnnnnnnnnnnnnnnnnnnnnnnnnnnnnnnnnnnnnnnnnnnnnnnnnnnnnnnnnnnnnnnnnnnnnnnnnnnnnnnnnnnnnnnnnnnnnnnnnnnnnnnnnnnnnnnnnnnnnnnnnnnnnnnnnnnnnnnnnnnnnnnnnnnnnnnnnnnnnnnnnnnnnnnnnnnnnnnnnnnnnnnnnnnnnnnnnnnnnnnnnnnnnnnnnnnnnnnnnnnnnnnnnnnnnnnnnnnnnnnnnnnnnnnnnnnnnnnnnnnnnnnnnnnnnnnnnnnnnnnnnnnnnnnnnnnnnnnnnnnnnnnnnnnnnnnnnnnnnnnnnnnnnnnnnnnnnnnnnnnnnnnnnnnnnnnnnnnnnnnnnnnnnnnnnnnnnnnnnnnnnnnnnnnnnnnnnnnnnnnnnnnnnnnnnnnnnnnnnnnnnnnnnnnnnnnnnnnnnnnnnnnnnnnnnnnnnnnnnnnnnnnnnnnnnnnnnnnnnnnnnnnnnnnnnnnnnnnnnnnnnnnnnnnnnnnnnnnnnnnnnnnnnnnnnnnnnnnnnnnnnnnnnnnnnnnnnnnnnnnnnnnnnnnnnnnnnnnnnnnnnnnnnnnnnnnnnnnnnnnnnnnnnnnnnnnnnnnnnnnnnnnnnnnnnnnnnnnnnnnnnnnnnnnnnnnnnnnnnnnnnnnnnnnnnnnnnnnnnnnnnnnnnnnnnnnnnnnnnnnnnnnnnnnnnnnnnnnnnnnnnnnnnnnnnnnnnnnnnnnnnnnnnnnnnnnnnnnnnnnnnnnnnnnnnnnnnnnnnnnnnnnnnnnnnnnnnnnnnnnnnnnnnnnnnnnnnnnnnnnnnnnnnnnnnnnnnnnnnnnnnnnnnnnnnnnnnnnnnnnnnnnnnnnnnnnnnnnnnnnnnnnnnnnnnnnnnnnnnnnnnnnnnnnnnnnnnnnnnnnnnnnnnnnnnnnnnnnnnnnnnnnnnnnnnnnnnnnnnnnnnnnnnnnnnnnnnnnnnnnnnnnnnnnnnnnnnnnnnnnnnnnnnnnnnnnnnnnnnnnnnnnnnnnnnnnnnnnnnnnnnnnnnnnnnnnnnnnnnnnnnnnnnnnnnnnnnnnnnnnnnnnnnnnnnnnnnnnnnnnnnnnnnnnnnnnnnnnnnnnnnnnnnnnnnnnnnnnnnnnnnnnnnnnnnnnnnnnnnnnnnnnnnnnnnnnnnnnnnnnnnnnnnnnnnnnnnnnnnnnnnnnnnnnnnnnnnnnnnnnnnnnnnnnnnnnnnnnnnnnnnnnnnnnnnnnnnnnnnnnnnnnnnnnnnnnnnnnnnnnnnnnnnnnnnnnnnnnnnnnnnnnnnnnnnnnnnnnnnnnnnnnnnnnnnnnnnnnnnnnnnnnnnnnnnnnnnnnnnnnnnnnnnnnnnnnnnnnnnnnnnnnnnnnnnnnnnnnnnnnnnnnnnnnnnnnnnnnnnnnnnnnnnnnnnnnnnnnnnnnnnnnnnnnnnnnnnnnnnnnnnnnnnnnnnnnnnnnnnnnnnnnnnnnnnnnnnnnnnnnnnnnnnnnnnnnnnnnnnnnnnnnnnnnnnnnnnnnnnnnnnnnnnnnnnnnnnnnnnnnnnnnnnnnnnnnnnnnnnnnnnnnnnnnnnnnnnnnnnnnnnnnnnnnnnnnnnnnnnnnnnnnnnnnnnnnnnnnnnnnnnnnnnnnnnnnnnnnnnnnnnnnnnnnnnnnnnnnnnnnnnnnnnnnnnnnnnnnnnnnnnnnnnnnnnnnnnnnnnnnnnnnnnnnnnnnnnnnnnnnnnnnnnnnnnnnnnnnnnnnnnnnnnnnnnnnnnnnnnnnnnnnnnnnnnnnnnnnnnnnnnnnnnnnnnnnnnnnnnnnnnnnnnnnnnnnnnnnnnnnnnnnnnnnnnnnnnnnnnnnnnnnnnnnnnnnnnnnnnnnnnnnnnnnnnnnnnnnnnnnnnnnnnnnnnnnnnnnnnnnnnnnnnnnnnnnnnnnnnnnnnnnnnnnnnnnnnnnnnnnnnnnnnnnnnnnnnnnnnnnnnnnnnnnnnnnnnnnnnnnnnnnnnnnnnnnnnnnnnnnnnnnnnnnnnnnnnnnnnnnnnnnnnnnnnnnnnnnnnnnnnnnnnnnnnnnnnnnnnnnnnnnnnnnnnnnnnnnnnnnnnnnnnnnnnnnnnnnnnnnnnnnnnnnnnnnnnnnnnnnnnnnnnnnnnnnnnnnnnnnnnnnnnnnnnnnnnnnnnnnnnnnnnnnnnnnnnnnnnnnnnnnnnnnnnnnnnnnnnnnnnnnnnnnnnnnnnnnnnnnnnnnnnnnnnnnnnnnnnnnnnnnnnnnnnnnnnnnnnnnnnnnnnnnnnnnnnnnnnnnnnnnnnnnnnnnnnnnnnnnnnnnnnnnnnnnnnnnnnnnnnnnnnnnnnnnnnnnnnnnnnnnnnnnnnnnnnnnnnnnnnnnnnnnnnnnnnnnnnnnnnnnnnnnnnnnnnnnnnnnnnnnnnnnnnnnnnnnnnnnnnnnnnnnnnnnnnnnnnnnnnnnnnnnnnnnnnnnnnnnnnnnnnnnnnnnnnnnnnnnnnnnnnnnnnnnnnnnnnnnnnnnnnnnnnnnnnnnnnnnnnnnnnnnnnnnnnnnnnnnnnnnnnnnnnnnnnnnnnnnnnnnnnnnnnnnnnnnnnnnnnnnnnnnnnnnnnnnnnnnnnnnnnnnnnnnnnnnnnnnnnnnnnnnnnnnnnnnnnnnnnnnnnnnnnnnnnnnnnnnnnnnnnnnnnnnnnnnnnnnnnnnnnnnnnnnnnnnnnnnnnnnnnnnnnnnnnnnnnnnnnnnnnnnnnnnnnnnnnnnnnnnnnnnnnnnnnnnnnnnnnnnnnnnnnnnnnnnnnnnnnnnnnnnnnnnnnnnnnnnnnnnnnnnnnnnnnnnnnnnnnnnnnnnnnnnnnnnnnnnnnnnnnnnnnnnnnnnnnnnnnnnnnnnnnnnnnnnnnnnnnnnnnnnnnnnnnnnnnnnnnnnnnnnnnnnnnnnnnnnnnnnnnnnnnnnnnnnnnnnnnnnnnnnnnnnnnnnnnnnnnnnnnnnnnnnnnnnnnnnnnnnnnnnnnnnnnnnnnnnnnnnnnnnnnnnnnnnnnnnnnnnnnnnnnnnnnnnnnnnnnnnnnnnnnnnnnnnnnnnnnnnnnnnnnnnnnnnnnnnnnnnnnnnnnnnnnnnnnnnnnnnnnnnnnnnnnnnnnnnnnnnnnnnnnnnnnnnnnnnnnnnnnnnnnnnnnnnnnnnnnnnnnnnnnnnnnnnnnnnnnnnnnnnnnnnnnnnnnnnnnnnnnnnnnnnnnnnnnnnnnnnnnnnnnnnnnnnnnnnnnnnnnnnnnnnnnnnnnnnnnnnnnnnnnnnnnnnnnnnnnnnnnnnnnnnnnnnnnnnnnnnnnnnnnnnnnnnnnnnnnnnnnnnnnnnnnnnnnnnnnnnnnnnnnnnnnnnnnnnnnnnnnnnnnnnnnnnnnnnnnnnnnnnnnnnnnnnnnnnnnnnnnnnnnnnnnnnnnnnnnnnnnnnnnnnnnnnnnnnnnnnnnnnnnnnnnnnnnnnnnnnnnnnnnnnnnnnnnnnnnnnnnnnnnnnnnnnnnnnnnnnnnnnnnnnnnnnnnnnnnnnnnnnnnnnnnnnnnnnnnnnnnnnnnnnnnnnnnnnnnnnnnnnnnnnnnnnnnnnnnnnnnnnnnnnnnnnnnnnnnnnnnnnnnnnnnnnnnnnnnnnnnnnnnnnnnnnnnnnnnnnnnnnnnnnnnnnnnnnnnnnnnnnnnnnnnnnnnnnnnnnnnnnnnnnnnnnnnnnnnnnnnnnnnnnnnnnnnnnnnnnnnnnnnnnnnnnnnnnnnnnnnnnnnnnnnnnnnnnnnnnnnnnnnnnnnnnnnnnnnnnnnnnnnnnnnnnnnnnnnnnnnnnnnnnnnnnnnnnnnnnnnnnnnnnnnnnnnnnnnnnnnnnnnnnnnnnnnnnnnnnnnnnnnnnnnnnnnnnnnnnnnnnnnnnnnnnnnnnnnnnnnnnnnnnnnnnnnnnnnnnnnnnnnnnnnnnnnnnnnnnnnnnnnnnnnnnnnnnnnnnnnnnnnnnnnnnnnnnnnnnnnnnnnnnnnnnnnnnnnnnnnnnnnnnnnnnnnnnnnnnnnnnnnnnnnnnnnnnnnnnnnnnnnnnnnnnnnnnnnnnnnnnnnnnnnnnnnnnnnnnnnnnnnnnnnnnnnnnnnnnnnnnnnnnnnnnnnnnnnnnnnnnnnnnnnnnnnnnnnnnnnnnnnnnnnnnnnnnnnnnnnnnnnnnnnnnnnnnnnnnnnnnnnnnnnnnnnnnnnnnnnnnnnnnnnnnnnnnnnnnnnnnnnnnnnnnnnnnnnnnnnnnnnnnnnnnnnnnnnnnnnnnnnnnnnnnnnnnnnnnnnnnnnnnnnnnnnnnnnnnnnnnnnnnnnnnnnnnnnnnnnnnnnnnnnnnnnnnnnnnnnnnnnnnnnnnnnnnnnnnnnnnnnnnnnnnnnnnnnnnnnnnnnnnnnnnnnnnnnnnnnnnnnnnnnnnnnnnnnnnnnnnnnnnnnnnnnnnnnnnnnnnnnnnnnnnnnnnnnnnnnnnnnnnnnnnnnnnnnnnnnnnnnnnnnnnnnnnnnnnnnnnnnnnnnnnnnnnnnnnnnnnnnnnnnnnnnnnnnnnnnnnnnnnnnnnnnnnnnnnnnnnnnnnnnnnnnnnnnnnnnnnnnnnnnnnnnnnnnnnnnnnnnnnnnnnnnnnnnnnnnnnnnnnnnnnnnnnnnnnnnnnnnnnnnnnnnnnnnnnnnnnnnnnnnnnnnnnnnnnnnnnnnnnnnnnnnnnnnnnnnnnnnnnnnnnnnnnnnnnnnnnnnnnnnnnnnnnnnnnnnnnnnnnnnnnnnnnnnnnnnnnnnnnnnnnnnnnnnnnnnnnnnnnnnnnnnnnnnnnnnnnnnnnnnnnnnnnnnnnnnnnnnnnnnnnnnnnnnnnnnnnnnnnnnnnnnnnnnnnnnnnnnnnnnnnnnnnnnnnnnnnnnnnnnnnnnnnnnnnnnnnnnnnnnnnnnnnnnnnnnnnnnnnnnnnnnnnnnnnnnnnnnnnnnnnnnnnnnnnnnnnnnnnnnnnnnnnnnnnnnnnnnnnnnnnnnnnnnnnnnnnnnnnnnnnnnnnnnnnnnnnnnnnnnnnnnnnnnnnnnnnnnnnnnnnnnnnnnnnnnnnnnnnnnnnnnnnnnnnnnnnnnnnnnnnnnnnnnnnnnnnnnnnnnnnnnnnnnnnnnnnnnnnnnnnnnnnnnnnnnnnnnnnnnnnnnnnnnnnnnnnnnnnnnnnnnnnnnnnnnnnnnnnnnnnnnnnnnnnnnnnnnnnnnnnnnnnnnnnnnnnnnnnnnnnnnnnnnnnnnnnnnnnnnnnnnnnnnnnnnnnnnnnnnnnnnnnnnnnnnnnnnnnnnnnnnnnnnnnnnnnnnnnnnnnnnnnnnnnnnnnnnnnnnnnnnnnnnnnnnnnnnnnnnnnnnnnnnnnnnnnnnnnnnnnnnnnnnnnnnnnnnnnnnnnnnnnnnnnnnnnnnnnnnnnnnnnnnnnnnnnnnnnnnnnnnnnnnnnnnnnnnnnnnnnnnnnnnnnnnnnnnnnnnnnnnnnnnnnnnnnnnnnnnnnnnnnnnnnnnnnnnnnnnnnnnnnnnnnnnnnnnnnnnnnnnnnnnnnnnnnnnnnnnnnnnnnnnnnnnnnnnnnnnnnnnnnnnnnnnnnnnnnnnnnnnnnnnnnnnnnnnnnnnnnnnnnnnnnnnnnnnnnnnnnnnnnnnnnnnnnnnnnnnnnnnnnnnnnnnnnnnnnnnnnnnnnnnnnnnnnnnnnnnnnnnnnnnnnnnnnnnnnnnnnnnnnnnnnnnnnnnnnnnnnnnnnnnnnnnnnnnnnnnnnnnnnnnnnnnnnnnnnnnnnnnnnnnnnnnnnnnnnnnnnnnnnnnnnnnnnnnnnnnnnnnnnnnnnnnnnnnnnnnnnnnnnnnnnnnnnnnnnnnnnnnnnnnnnnnnnnnnnnnnnnnnnnnnnnnnnnnnnnnnnnnnnnnnnnnnnnnnnnnnnnnnnnnnnnnnnnnnnnnnnnnnnnnnnnnnnnnnnnnnnnnnnnnnnnnnnnnnnnnnnnnnnnnnnnnnnnnnnnnnnnnnnnnnnnnnnnnnnnnnnnnnnnnnnnnnnnnnnnnnnnnnnnnnnnnnnnnnnnnnnnnnnnnnnnnnnnnnnnnnnnnnnnnnnnnnnnnnnnnnnnnnnnnnnnnnnnnnnnnnnnnnnnnnnnnnnnnnnnnnnnnnnnnnnnnnnnnnnnnnnnnnnnnnnnnnnnnnnnnnnnnnnnnnnnnnnnnnnnnnnnnnnnnnnnnnnnnnnnnnnnnnnnnnnnnnnnnnnnnnnnnnnnnnnnnnnnnnnnnnnnnnnnnnnnnnnnnnnnnnnnnnnnnnnnnnnnnnnnnnnnnnnnnnnnnnnnnnnnnnnnnnnnnnnnnnnnnnnnnnnnnnnnnnnnnnnnnnnnnnnnnnnnnnnnnnnnnnnnnnnnnnnnnnnnnnnnnnnnnnnnnnnnnnnnnnnnnnnnnnnnnnnnnnnnnnnnnnnnnnnnnnnnnnnnnnnnnnnnnnnnnnnnnnnnnnnnnnnnnnnnnnnnnnnnnnnnnnnnnnnnnnnnnnnnnnnnnnnnnnnnnnnnnnnnnnnnnnnnnnnnnnnnnnnnnnnnnnnnnnnnnnnnnnnnnnnnnnnnnnnnnnnnnnnnnnnnnnnnnnnnnnnnnnnnnnnnnnnnnnnnnnnnnnnnnnnnnnnnnnnnnnnnnnnnnnnnnnnnnnnnnnnnnnnnnnnnnnnnnnnnnnnnnnnnnnnnnnnnnnnnnnnnnnnnnnnnnnnnnnnnnnnnnnnnnnnnnnnnnnnnnnnnnnnnnnnnnnnnnnnnnnnnnnnnnnnnnnnnnnnnnnnnnnnnnnnnnnnnnnnnnnnnnnnnnnnnnnnnnnnnnnnnnnnnnnnnnnnnnnnnnnnnnnnnnnnnnnnnnnnnnnnnnnnnnnnnnnnnnnnnnnnnnnnnnnnnnnnnnnnnnnnnnnnnnnnnnnnnnnnnnnnnnnnnnnnnnnnnnnnnnnnnnnnnnnnnnnnnnnnnnnnnnnnnnnnnnnnnnnnnnnnnnnnnnnnnnnnnnnnnnnnnnnnnnnnnnnnnnnnnnnnnnnnnnnnnnnnnnnnnnnnnnnnnnnnnnnnnnnnnnnnnnnnnnnnnnnnnnnnnnnnnnnnnnnnnnnnnnnnnnnnnnnnnnnnnnnnnnnnnnnnnnnnnnnnnnnnnnnnnnnnnnnnnnnnnnnnnnnnnnnnnnnnnnnnnnnnnnnnnnnnnnnnnnnnnnnnnnnnnnnnnnnnnnnnnnnnnnnnnnnnnnnnnnnnnnnnnnnnnnnnnnnnnnnnnnnnnnnnnnnnnnnnnnnnnnnnnnnnnnnnnnnnnnnnnnnnnnnnnnnnnnnnnnnnnnnnnnnnnnnnnnnnnnnnnnnnnnnnnnnnnnnnnnnnnnnnnnnnnnnnnnnnnnnnnnnnnnnnnnnnnnnnnnnnnnnnnnnnnnnnnnnnnnnnnnnnnnnnnnnnnnnnnnnnnnnnnnnnnnnnnnnnnnnnnnnnnnnnnnnnnnnnnnnnnnnnnnnnnnnnnnnnnnnnnnnnnnnnnnnnnnnnnnnnnnnnnnnnnnnnnnnnnnnnnnnnnnnnnnnnnnnnnnnnnnnnnnnnnnnnnnnnnnnnnnnnnnnnnnnnnnnnnnnnnnnnnnnnnnnnnnnnnnnnnnnnnnnnnnnnnnnnnnnnnnnnnnnnnnnnnnnnnnnnnnnnnnnnnnnnnnnnnnnnnnnnnnnnnnnnnnnnnnnnnnnnnnnnnnnnnnnnnnnnnnnnnnnnnnnnnnnnnnnnnnnnnnnnnnnnnnnnnnnnnnnnnnnnnnnnnnnnnnnnnnnnnnnnnnnnnnnnnnnnnnnnnnnnnnnnnnnnnnnnnnnnnnnnnnnnnnnnnnnnnnnnnnnnnnnnnnnnnnnnnnnnnnnnnnnnnnnnnnnnnnnnnnnnnnnnnnnnnnnnnnnnnnnnnnnnnnnnnnnnnnnnnnnnnnnnnnnnnnnnnnnnnnnnnnnnnnnnnnnnnnnnnnnnnnnnnnnnnnnnnnnnnnnnnnnnnnnnnnnnnnnnnnnnnnnnnnnnnnnnnnnnnnnnnnnnnnnnnnnnnnnnnnnnnnnnnnnnnnnnnnnnnnnnnnnnnnnnnnnnnnnnnnnnnnnnnnnnnnnnnnnnnnnnnnnnnnnnnnnnnnnnnnnnnnnnnnnnnnnnnnnnnnnnnnnnnnnnnnnnnnnnnnnnnnnnnnnnnnnnnnnnnnnnnnnnnnnnnnnnnnnnnnnnnnnnnnnnnnnnnnnnnnnnnnnnnnnnnnnnnnnnnnnnnnnnnnnnnnnnnnnnnnnnnnnnnnnnnnnnnnnnnnnnnnnnnnnnnnnnnnnnnnnnnnnnnnnnnnnnnnnnnnnnnnnnnnnnnnnnnnnnnnnnnnnnnnnnnnnnnnnnnnnnnnnnnnnnnnnnnnnnnnnnnnnnnnnnnnnnnnnnnnnnnnnnnnnnnnnnnnnnnnnnnnnnnnnnnnnnnnnnnnnnnnnnnnnnnnnnnnnnnnnnnnnnnnnnnnnnnnnnnnnnnnnnnnnnnnnnnnnnnnnnnnnnnnnnnnnnnnnnnnnnnnnnnnnnnnnnnnnnnnnnnnnnnnnnnnnnnnnnnnnnnnnnnnnnnnnnnnnnnnnnnnnnnnnnnnnnnnnnnnnnnnnnnnnnnnnnnnnnnnnnnnnnnnnnnnnnnnnnnnnnnnnnnnnnnnnnnnnnnnnnnnnnnnnnnnnnnnnnnnnnnnnnnnnnnnnnnnnnnnnnnnnnnnnnnnnnnnnnnnnnnnnnnnnnnnnnnnnnnnnnnnnnnnnnnnnnnnnnnnnnnnnnnnnnnnnnnnnnnnnnnnnnnnnnnnnnnnnnnnnnnnnnnnnnnnnnnnnnnnnnnnnnnnnnnnnnnnnnnnnnnnnnnnnnnnnnnnnnnnnnnnnnnnnnnnnnnnnnnnnnnnnnnnnnnnnnnnnnnnnnnnnnnnnnnnnnnnnnnnnnnnnnnnnnnnnnnnnnnnnnnnnnnnnnnnnnnnnnnnnnnnnnnnnnnnnnnnnnnnnnnnnnnnnnnnnnnnnnnnnnnnnnnnnnnnnnnnnnnnnnnnnnnnnnnnnnnnnnnnnnnnnnnnnnnnnnnnnnnnnnnnnnnnnnnnnnnnnnnnnnnnnnnnnnnnnnnnnnnnnnnnnnnnnnnnnnnnnnnnnnnnnnnnnnnnnnnnnnnnnnnnnnnnnnnnnnnnnnnnnnnnnnnnnnnnnnnnnnnnnnnnnnnnnnnnnnnnnnnnnnnnnnnnnnnnnnnnnnnnnnnnnnnnnnnnnnnnnnnnnnnnnnnnnnnnnnnnnnnnnnnnnnnnnnnnnnnnnnnnnnnnnnnnnnnnnnnnnnnnnnnnnnnnnnnnnnnnnnnnnnnnnnnnnnnnnnnnnnnnnnnnnnnnnnnnnnnnnnnnnnnnnnnnnnnnnnnnnnnnnnnnnnnnnnnnnnnnnnnnnnnnnnnnnnnnnnnnnnnnnnnnnnnnnnnnnnnnnnnnnnnnnnnnnnnnnnnnnnnnnnnnnnnnnnnnnnnnnnnnnnnnnnnnnnnnnnnnnnnnnnnnnnnnnnnnnnnnnnnnnnnnnnnnnnnnnnnnnnnnnnnnnnnnnnnnnnnnnnnnnnnnnnnnnnnnnnnnnnnnnnnnnnnnnnnnnnnnnnnnnnnnnnnnnnnnnnnnnnnnnnnnnnnnnnnnnnnnnnnnnnnnnnnnnnnnnnnnnnnnnnnnnnnnnnnnnnnnnnnnnnnnnnnnnnnnnnnnnnnnnnnnnnnnnnnnnnnnnnnnnnnnnnnnnnnnnnnnnnnnnnnnnnnnnnnnnnnnnnnnnnnnnnnnnnnnnnnnnnnnnnnnnnnnnnnnnnnnnnnnnnnnnnnnnnnnnnnnnnnnnnnnnnnnnnnnnnnnnnnnnnnnnnnnnnnnnnnnnnnnnnnnnnnnnnnnnnnnnnnnnnnnnnnnnnnnnnnnnnnnnnnnnnnnnnnnnnnnnnnnnnnnnnnnnnnnnnnnnnnnnnnnnnnnnnnnnnnnnnnnnnnnnnnnnnnnnnnnnnnnnnnnnnnnnnnnnnnnnnnnnnnnnnnnnnnnnnnnnnnnnnnnnnnnnnnnnnnnnnnnnnnnnnnnnnnnnnnnnnnnnnnnnnnnnnnnnnnnnnnnnnnnnnnnnnnnnnnnnnnnnnnnnnnnnnnnnnnnnnnnnnnnnnnnnnnnnnnnnnnnnnnnnnnnnnnnnnnnnnnnnnnnnnnnnnnnnnnnnnnnnnnnnnnnnnnnnnnnnnnnnnnnnnnnnnnnnnnnnnnnnnnnnnnnnnnnnnnnnnnnnnnnnnnnnnnnnnnnnnnnnnnnnnnnnnnnnnnnnnnnnnnnnnnnnnnnnnnnnnnnnnnnnnnnnnnnnnnnnnnnnnnnnnnnnnnnnnnnnnnnnnnnnnnnnnnnnnnnnnnnnnnnnnnnnnnnnnnnnnnnnnnnnnnnnnnnnnnnnnnnnnnnnnnnnnnnnnnnnnnnnnnnnnnnnnnnnnnnnnnnnnnnnnnnnnnnnnnnnnnnnnnnnnnnnnnnnnnnnnnnnnnnnnnnnnnnnnnnnnnnnnnnnnnnnnnnnnnnnnnnnnnnnnnnnnnnnnnnnnnnnnnnnnnnnnnnnnnnnnnnnnnnnnnnnnnnnnnnnnnnnnnnnnnnnnnnnnnnnnnnnnnnnnnnnnnnnnnnnnnnnnnnnnnnnnnnnnnnnnnnnnnnnnnnnnnnnnnnnnnnnnnnnnnnnnnnnnnnnnnnnnnnnnnnnnnnnnnnnnnnnnnnnnnnnnnnnnnnnnnnnnnnnnnnnnnnnnnnnnnnnnnnnnnnnnnnnnnnnnnnnnnnnnnnnnnnnnnnnnnnnnnnnnnnnnnnnnnnnnnnnnnnnnnnnnnnnnnnnnnnnnnnnnnnnnnnnnnnnnnnnnnnnnnnnnnnnnnnnnnnnnnnnnnnnnnnnnnnnnnnnnnnnnnnnnnnnnnnnnnnnnnnnnnnnnnnnnnnnnnnnnnnnnnnnnnnnnnnnnnnnnnnnnnnnnnnnnnnnnnnnnnnnnnnnnnnnnnnnnnnnnnnnnnnnnnnnnnnnnnnnnnnnnnnnnnnnnnnnnnnnnnnnnnnnnnnnnnnnnnnnnnnnnnnnnnnnnnnnnnnnnnnnnnnnnnnnnnnnnnnnnnnnnnnnnnnnnnnnnnnnnnnnnnnnnnnnnnnnnnnnnnnnnnnnnnnnnnnnnnnnnnnnnnnnnnnnnnnnnnnnnnnnnnnnnnnnnnnnnnnnnnnnnnnnnnnnnnnnnnnnnnnnnnnnnnnnnnnnnnnnnnnnnnnnnnnnnnnnnnnnnnnnnnnnnnnnnnnnnnnnnnnnnnnnnnnnnnnnnnnnnnnnnnnnnnnnnnnnnnnnnnnnnnnnnnnnnnnnnnnnnnnnnnnnnnnnnnnnnnnnnnnnnnnnnnnnnnnnnnnnnnnnnnnnnnnnnnnnnnnnnnnnnnnnnnnnnnnnnnnnnnnnnnnnnnnnnnnnnnnnnnnnnnnnnnnnnnnnnnnnnnnnnnnnnnnnnnnnnnnnnnnnnnnnnnnnnnnnnnnnnnnnnnnnnnnnnnnnnnnnnnnnnnnnnnnnnnnnnnnnnnnnnnnnnnnnnnnnnnnnnnnnnnnnnnnnnnnnnnnnnnnnnnnnnnnnnnnnnnnnnnnnnnnnnnnnnnnnnnnnnnnnnnnnnnnnnnnnnnnnnnnnnnnnnnnnnnnnnnnnnnnnnnnnnnnnnnnnnnnnnnnnnnnnnnnnnnnnnnnnnnnnnnnnnnnnnnnnnnnnnnnnnnnnnnnnnnnnnnnnnnnnnnnnnnnnnnnnnnnnnnnnnnnnnnnnnnnnnnnnnnnnnnnnnnnnnnnnnnnnnnnnnnnnnnnnnnnnnnnnnnnnnnnnnnnnnnnnnnnnnnnnnnnnnnnnnnnnnnnnnnnnnnnnnnnnnnnnnnnnnnnnnnnnnnnnnnnnnnnnnnnnnnnnnnnnnnnnnnnnnnnnnnnnnnnnnnnnnnnnnnnnnnnnnnnnnnnnnnnnnnnnnnnnnnnnnnnnnnnnnnnnnnnnnnnnnnnnnnnnnnnnnnnnnnnnnnnnnnnnnnnnnnnnnnnnnnnnnnnnnnnnnnnnnnnnnnnnnnnnnnnnnnnnnnnnnnnnnnnnnnnnnnnnnnnnnnnnnnnnnnnnnnnnnnnnnnnnnnnnnnnnnnnnnnnnnnnnnnnnnnnnnnnnnnnnnnnnnnnnnnnnnnnnnnnnnnnnnnnnnnnnnnnnnnnnnnnnnnnnnnnnnnnnnnnnnnnnnnnnnnnnnnnnnnnnnnnnnnnnnnnnnnnnnnnnnnnnnnnnnnnnnnnnnnnnnnnnnnnnnnnnnnnnnnnnnnnnnnnnnnnnnnnnnnnnnnnnnnnnnnnnnnnnnnnnnnnnnnnnnnnnnnnnnnnnnnnnnnnnnnnnnnnnnnnnnnnnnnnnnnnnnnnnnnnnnnnnnnnnnnnnnnnnnnnnnnnnnnnnnnnnnnnnnnnnnnnnnnnnnnnnnnnnnnnnnnnnnnnnnnnnnnnnnnnnnnnnnnnnnnnnnnnnnnnnnnnnnnnnnnnnnnnnnnnnnnnnnnnnnnnnnnnnnnnnnnnnnnnnnnnnnnnnnnnnnnnnnnnnnnnnnnnnnnnnnnnnnnnnnnnnnnnnnnnnnnnnnnnnnnnnnnnnnnnnnnnnnnnnnnnnnnnnnnnnnnnnnnnnnnnnnnnnnnnnnnnnnnnnnnnnnnnnnnnnnnnnnnnnnnnnnnnnnnnnnnnnnnnnnnnnnnnnnnnnnnnnnnnnnnnnnnnnnnnnnnnnnnnnnnnnnnnnnnnnnnnnnnnnnnnnnnnnnnnnnnnnnnnnnnnnnnnnnnnnnnnnnnnnnnnnnnnnnnnnnnnnnnnnnnnnnnnnnnnnnnnnnnnnnnnnnnnnnnnnnnnnnnnnnnnnnnnnnnnnnnnnnnnnnnnnnnnnnnnnnnnnnnnnnnnnnnnnnnnnnnnnnnnnnnnnnnnnnnnnnnnnnnnnnnnnnnnnnnnnnnnnnnnnnnnnnnnnnnnnnnnnnnnnnnnnnnnnnnnnnnnnnnnnnnnnnnnnnnnnnnnnnnnnnnnnnnnnnnnnnnnnnnnnnnnnnnnnnnnnnnnnnnnnnnnnnnnnnnnnnnnnnnnnnnnnnnnnnnnnnnnnnnnnnnnnnnnnnnnnnnnnnnnnnnnnnnnnnnnnnnnnnnnnnnnnnnnnnnnnnnnnnnnnnnnnnnnnnnnnnnnnnnnnnnnnnnnnnnnnnnnnnnnnnnnnnnnnnnnnnnnnnnnnnnnnnnnnnnnnnnnnnnnnnnnnnnnnnnnnnnnnnnnnnnnnnnnnnnnnnnnnnnnnnnnnnnnnnnnnnnnnnnnnnnnnnnnnnnnnnnnnnnnnnnnnnnnnnnnnnnnnnnnnnnnnnnnnnnnnnnnnnnnnnnnnnnnnnnnnnnnnnnnnnnnnnnnnnnnnnnnnnnnnnnnnnnnnnnnnnnnnnnnnnnnnnnnnnnnnnnnnnnnnnnnnnnnnnnnnnnnnnnnnnnnnnnnnnnnnnnnnnnnnnnnnnnnnnnnnnnnnnnnnnnnnnnnnnnnnnnnnnnnnnnnnnnnnnnnnnnnnnnnnnnnnnnnnnnnnnnnnnnnnnnnnnnnnnnnnnnnnnnnnnnnnnnnnnnnnnnnnnnnnnnnnnnnnnnnnnnnnnnnnnnnnnnnnnnnnnnnnnnnnnnnnnnnnnnnnnnnnnnnnnnnnnnnnnnnnnnnnnnnnnnnnnnnnnnnnnnnnnnnnnnnnnnnnnnnnnnnnnnnnnnnnnnnnnnnnnnnnnnnnnnnnnnnnnnnnnnnnnnnnnnnnnnnnnnnnnnnnnnnnnnnnnnnnnnnnnnnnnnnnnnnnnnnnnnnnnnnnnnnnnnnnnnnnnnnnnnnnnnnnnnnnnnnnnnnnnnnnnnnnnnnnnnnnnnnnnnnnnnnnnnnnnnnnnnnnnnnnnnnnnnnnnnnnnnnnnnnnnnnnnnnnnnnnnnnnnnnnnnnnnnnnnnnnnnnnnnnnnnnnnnnnnnnnnnnnnnnnnnnnnnnnnnnnnnnnnnnnnnnnnnnnnnnnnnnnnnnnnnnnnnnnnnnnnnnnnnnnnnnnnnnnnnnnnnnnnnnnnnnnnnnnnnnnnnnnnnnnnnnnnnnnnnnnnnnnnnnnnnnnnnnnnnnnnnnnnnnnnnnnnnnnnnnnnnnnnnnnnnnnnnnnnnnnnnnnnnnnnnnnnnnnnnnnnnnnnnnnnnnnnnnnnnnnnnnnnnnnnnnnnnnnnnnnnnnnnnnnnnnnnnnnnnnnnnnnnnnnnnnnnnnnnnnnnnnnnnnnnnnnnnnnnnnnnnnnnnnnnnnnnnnnnnnnnnnnnnnnnnnnnnnnnnnnnnnnnnnnnnnnnnnnnnnnnnnnnnnnnnnnnnnnnnnnnnnnnnnnnnnnnnnnnnnnnnnnnnnnnnnnnnnnnnnnnnnnnnnnnnnnnnnnnnnnnnnnnnnnnnnnnnnnnnnnnnnnnnnnnnnnnnnnnnnnnnnnnnnnnnnnnnnnnnnnnnnnnnnnnnnnnnnnnnnnnnnnnnnnnnnnnnnnnnnnnnnnnnnnnnnnnnnnnnnnnnnnnnnnnnnnnnnnnnnnnnnnnnnnnnnnnnnnnnnnnnnnnnnnnnnnnnnnnnnnnnnnnnnnnnnnnnnnnnnnnnnnnnnnnnnnnnnnnnnnnnnnnnnnnnnnnnnnnnnnnnnnnnnnnnnnnnnnnnnnnnnnnnnnnnnnnnnnnnnnnnnnnnnnnnnnnnnnnnnnnnnnnnnnnnnnnnnnnnnnnnnnnnnnnnnnnnnnnnnnnnnnnnnnnnnnnnnnnnnnnnnnnnnnnnnnnnnnnnnnnnnnnnnnnnnnnnnnnnnnnnnnnnnnnnnnnnnnnnnnnnnnnnnnnnnnnnnnnnnnnnnnnnnnnnnnnnnnnnnnnnnnnnnnnnnnnnnnnnnnnnnnnnnnnnnnnnnnnnnnnnnnnnnnnnnnnnnnnnnnnnnnnnnnnnnnnnnnnnnnnnnnnnnnnnnnnnnnnnnnnnnnnnnnnnnnnnnnnnnnnnnnnnnnnnnnnnnnnnnnnnnnnnnnnnnnnnnnnnnnnnnnnnnnnnnnnnnnnnnnnnnnnnnnnnnnnnnnnnnnnnnnnnnnnnnnnnnnnnnnnnnnnnnnnnnnnnnnnnnnnnnnnnnnnnnnnnnnnnnnnnnnnnnnnnnnnnnnnnnnnnnnnnnnnnnnnnnnnnnnnnnnnnnnnnnnnnnnnnnnnnnnnnnnnnnnnnnnnnnnnnnnnnnnnnnnnnnnnnnnnnnnnnnnnnnnnnnnnnnnnnnnnnnnnnnnnnnnnnnnnnnnnnnnnnnnnnnnnnnnnnnnnnnnnnnnnnnnnnnnnnnnnnnnnnnnnnnnnnnnnnnnnnnnnnnnnnnnnnnnnnnnnnnnnnnnnnnnnnnnnnnnnnnnnnnnnnnnnnnnnnnnnnnnnnnnnnnnnnnnnnnnnnnnnnnnnnnnnnnnnnnnnnnnnnnnnnnnnnnnnnnnnnnnnnnnnnnnnnnnnnnnnnnnnnnnnnnnnnnnnnnnnnnnnnnnnnnnnnnnnnnnnnnnnnnnnnnnnnnnnnnnnnnnnnnnnnnnnnnnnnnnnnnnnnnnnnnnnnnnnnnnnnnnnnnnnnnnnnnnnnnnnnnnnnnnnnnnnnnnnnnnnnnnnnnnnnnnnnnnnnnnnnnnnnnnnnnnnnnnnnnnnnnnnnnnnnnnnnnnnnnnnnnnnnnnnnnnnnnnnnnnnnnnnnnnnnnnnnnnnnnnnnnnnnnnnnnnnnnnnnnnnnnnnnnnnnnnnnnnnnnnnnnnnnnnnnnnnnnnnnnnnnnnnnnnnnnnnnnnnnnnnnnnnnnnnnnnnnnnnnnnnnnnnnnnnnnnnnnnnnnnnnnnnnnnnnnnnnnnnnnnnnnnnnnnnnnnnnnnnnnnnnnnnnnnnnnnnnnnnnnnnnnnnnnnnnnnnnnnnnnnnnnnnnnnnnnnnnnnnnnnnnnnnnnnnnnnnnnnnnnnnnnnnnnnnnnnnnnnnnnnnnnnnnnnnnnnnnnnnnnnnnnnnnnnnnnnnnnnnnnnnnnnnnnnnnnnnnnnnnnnnnnnnnnnnnnnnnnnnnnnnnnnnnnnnnnnnnnnnnnnnnnnnnnnnnnnnnnnnnnnnnnnnnnnnnnnnnnnnnnnnnnnnnnnnnnnnnnnnnnnnnnnnnnnnnnnnnnnnnnnnnnnnnnnnnnnnnnnnnnnnnnnnnnnnnnnnnnnnnnnnnnnnnnnnnnnnnnnnnnnnnnnnnnnnnnnnnnnnnnnnnnnnnnnnnnnnnnnnnnnnnnnnnnnnnnnnnnnnnnnnnnnnnnnnnnnnnnnnnnnnnnnnnnnnnnnnnnnnnnnnnnnnnnnnnnnnnnnnnnnnnnnnnnnnnnnnnnnnnnnnnnnnnnnnnnnnnnnnnnnnnnnnnnnnnnnnnnnnnnnnnnnnnnnnnnnnnnnnnnnnnnnnnnnnnnnnnnnnnnnnnnnnnnnnnnnnnnnnnnnnnnnnnnnnnnnnnnnnnnnnnnnnnnnnnnnnnnnnnnnnnnnnnnnnnnnnnnnnnnnnnnnnnnnnnnnnnnnnnnnnnnnnnnnnnnnnnnnnnnnnnnnnnnnnnnnnnnnnnnnnnnnnnnnnnnnnnnnnnnnnnnnnnnnnnnnnnnnnnnnnnnnnnnnnnnnnnnnnnnnnnnnnnnnnnnnnnnnnnnnnnnnnnnnnnnnnnnnnnnnnnnnnnnnnnnnnnnnnnnnnnnnnnnnnnnnnnnnnnnnnnnnnnnnnnnnnnnnnnnnnnnnnnnnnnnnnnnnnnnnnnnnnnnnnnnnnnnnnnnnnnnnnnnnnnnnnnnnnnnnnnnnnnnnnnnnnnnnnnnnnnnnnnnnnnnnnnnnnnnnnnnnnnnnnnnnnnnnnnnnnnnnnnnnnnnnnnnnnnnnnnnnnnnnnnnnnnnnnnnnnnnnnnnnnnnnnnnnnnnnnnnnnnnnnnnnnnnnnnnnnnnnnnnnnnnnnnnnnnnnnnnnnnnnnnnnnnnnnnnnnnnnnnnnnnnnnnnnnnnnnnnnnnnnnnnnnnnnnnnnnnnnnnnnnnnnnnnnnnnnnnnnnnnnnnnnnnnnnnnnnnnnnnnnnnnnnnnnnnnnnnnnnnnnnnnnnnnnnnnnnnnnnnnnnnnnnnnnnnnnnnnnnnnnnnnnnnnnnnnnnnnnnnnnnnnnnnnnnnnnnnnnnnnnnnnnnnnnnnnnnnnnnnnnnnnnnnnnnnnnnnnnnnnnnnnnnnnnnnnnnnnnnnnnnnnnnnnnnnnnnnnnnnnnnnnnnnnnnnnnnnnnnnnnnnnnnnnnnnnnnnnnnnnnnnnnnnnnnnnnnnnnnnnnnnnnnnnnnnnnnnnnnnnnnnnnnnnnnnnnnnnnnnnnnnnnnnnnnnnnnnnnnnnnnnnnnnnnnnnnnnnnnnnnnnnnnnnnnnnnnnnnnnnnnnnnnnnnnnnnnnnnnnnnnnnnnnnnnnnnnnnnnnnnnnnnnnnnnnnnnnnnnnnnnnnnnnnnnnnnnnnnnnnnnnnnnnnnnnnnnnnnnnnnnnnnnnnnnnnnnnnnnnnnnnnnnnnnnnnnnnnnnnnnnnnnnnnnnnnnnnnnnnnnnnnnnnnnnnnnnnnnnnnnnnnnnnnnnnnnnnnnnnnnnnnnnnnnnnnnnnnnnnnnnnnnnnnnnnnnnnnnnnnnnnnnnnnnnnnnnnnnnnnnnnnnnnnnnnnnnnnnnnnnnnnnnnnnnnnnnnnnnnnnnnnnnnnnnnnnnnnnnnnnnnnnnnnnnnnnnnnnnnnnnnnnnnnnnnnnnnnnnnnnnnnnnnnnnnnnnnnnnnnnnnnnnnnnnnnnnnnnnnnnnnnnnnnnnnnnnnnnnnnnnnnnnnnnnnnnnnnnnnnnnnnnnnnnnnnnnnnnnnnnnnnnnnnnnnnnnnnnnnnnnnnnnnnnnnnnnnnnnnnnnnnnnnnnnnnnnnnnnnnnnnnnnnnnnnnnnnnnnnnnnnnnnnnnnnnnnnnnnnnnnnnnnnnnnnnnnnnnnnnnnnnnnnnnnnnnnnnnnnnnnnnnnnnnnnnnnnnnnnnnnnnnnnnnnnnnnnnnnnnnnnnnnnnnnnnnnnnnnnnnnnnnnnnnnnnnnnnnnnnnnnnnnnnnnnnnnnnnnnnnnnnnnnnnnnnnnnnnnnnnnnnnnnnnnnnnnnnnnnnnnnnnnnnnnnnnnnnnnnnnnnnnnnnnnnnnnnnnnnnnnnnnnnnnnnnnnnnnnnnnnnnnnnnnnnnnnnnnnnnnnnnnnnnnnnnnnnnnnnnnnnnnnnnnnnnnnnnnnnnnnnnnnnnnnnnnnnnnnnnnnnnnnnnnnnnnnnnnnnnnnnnnnnnnnnnnnnnnnnnnnnnnnnnnnnnnnnnnnnnnnnnnnnnnnnnnnnnnnnnnnnnnnnnnnnnnnnnnnnnnnnnnnnnnnnnnnnnnnnnnnnnnnnnnnnnnnnnnnnnnnnnnnnnnnnnnnnnnnnnnnnnnnnnnnnnnnnnnnnnnnnnnnnnnnnnnnnnnnnnnnnnnnnnnnnnnnnnnnnnnnnnnnnnnnnnnnnnnnnnnnnnnnnnnnnnnnnnnnnnnnnnnnnnnnnnnnnnnnnnnnnnnnnnnnnnnnnnnnnnnnnnnnnnnnnnnnnnnnnnnnnnnnnnnnnnnnnnnnnnnnnnnnnnnnnnnnnnnnnnnnnnnnnnnnnnnnnnnnnnnnnnnnnnnnnnnnnnnnnnnnnnnnnnnnnnnnnnnnnnnnnnnnnnnnnnnnnnnnnnnnnnnnnnnnnnnnnnnnnnnnnnnnnnnnnnnnnnnnnnnnnnnnnnnnnnnnnnnnnnnnnnnnnnnnnnnnnnnnnnnnnnnnnnnnnnnnnnnnnnnnnnnnnnnnnnnnnnnnnnnnnnnnnnnnnnnnnnnnnnnnnnnnnnnnnnnnnnnnnnnnnnnnnnnnnnnnnnnnnnnnnnnnnnnnnnnnnnnnnnnnnnnnnnnnnnnnnnnnnnnnnnnnnnnnnnnnnnnnnnnnnnnnnnnnnnnnnnnnnnnnnnnnnnnnnnnnnnnnnnnnnnnnnnnnnnnnnnnnnnnnnnnnnnnnnnnnnnnnnnnnnnnnnnnnnnnnnnnnnnnnnnnnnnnnnnnnnnnnnnnnnnnnnnnnnnnnnnnnnnnnnnnnnnnnnnnnnnnnnnnnnnnnnnnnnnnnnnnnnnnnnnnnnnnnnnnnnnnnnnnnnnnnnnnnnnnnnnnnnnnnnnnnnnnnnnnnnnnnnnnnnnnnnnnnnnnnnnnnnnnnnnnnnnnnnnnnnnnnnnnnnnnnnnnnnnnnnnnnnnnnnnnnnnnnnnnnnnnnnnnnnnnnnnnnnnnnnnnnnnnnnnnnnnnnnnnnnnnnnnnnnnnnnnnnnnnnnnnnnnnnnnnnnnnnnnnnnnnnnnnnnnnnnnnnnnnnnnnnnnnnnnnnnnnnnnnnnnnnnnnnnnnnnnnnnnnnnnnnnnnnnnnnnnnnnnnnnnnnnnnnnnnnnnnnnnnnnnnnnnnnnnnnnnnnnnnnnnnnnnnnnnnnnnnnnnnnnnnnnnnnnnnnnnnnnnnnnnnnnnnnnnnnnnnnnnnnnnnnnnnnnnnnnnnnnnnnnnnnnnnnnnnnnnnnnnnnnnnnnnnnnnnnnnnnnnnnnnnnnnnnnnnnnnnnnnnnnnnnnnnnnnnnnnnnnnnnnnnnnnnnnnnnnnnnnnnnnnnnnnnnnnnnnnnnnnnnnnnnnnnnnnnnnnnnnnnnnnnnnnnnnnnnnnnnnnnnnnnnnnnnnnnnnnnnnnnnnnnnnnnnnnnnnnnnnnnnnnnnnnnnnnnnnnnnnnnnnnnnnnnnnnnnnnnnnnnnnnnnnnnnnnnnnnnnnnnnnnnnnnnnnnnnnnnnnnnnnnnnnnnnnnnnnnnnnnnnnnnnnnnnnnnnnnnnnnnnnnnnnnnnnnnnnnnnnnnnnnnnnnnnnnnnnnnnnnnnnnnnnnnnnnnnnnnnnnnnnnnnnnnnnnnnnnnnnnnnnnnnnnnnnnnnnnnnnnnnnnnnnnnnnnnnnnnnnnnnnnnnnnnnnnnnnnnnnnnnnnnnnnnnnnnnnnnnnnnnnnnnnnnnnnnnnnnnnnnnnnnnnnnnnnnnnnnnnnnnnnnnnnnnnnnnnnnnnnnnnnnnnnnnnnnnnnnnnnnnnnnnnnnnnnnnnnnnnnnnnnnnnnnnnnnnnnnnnnnnnnnnnnnnnnnnnnnnnnnnnnnnnnnnnnnnnnnnnnnnnnnnnnnnnnnnnnnnnnnnnnnnnnnnnnnnnnnnnnnnnnnnnnnnnnnnnnnnnnnnnnnnnnnnnnnnnnnnnnnnnnnnnnnnnnnnnnnnnnnnnnnnnnnnnnnnnnnnnnnnnnnnnnnnnnnnnnnnnnnnnnnnnnnnnnnnnnnnnnnnnnnnnnnnnnnnnnnnnnnnnnnnnnnnnnnnnnnnnnnnnnnnnnnnnnnnnnnnnnnnnnnnnnnnnnnnnnnnnnnnnnnnnnnnnnnnnnnnnnnnnnnnnnnnnnnnnnnnnnnnnnnnnnnnnnnnnnnnnnnnnnnnnnnnnnnnnnnnnnnnnnnnnnnnnnnnnnnnnnnnnnnnnnnnnnnnnnnnnnnnnnnnnnnnnnnnnnnnnnnnnnnnnnnnnnnnnnnnnnnnnnnnnnnnnnnnnnnnnnnnnnnnnnnnnnnnnnnnnnnnnnnnnnnnnnnnnnnnnnnnnnnnnnnnnnnnnnnnnnnnnnnnnnnnnnnnnnnnnnnnnnnnnnnnnnnnnnnnnnnnnnnnnnnnnnnnnnnnnnnnnnnnnnnnnnnnnnnnnnnnnnnnnnnnnnnnnnnnnnnnnnnnnnnnnnnnnnnnnnnnnnnnnnnnnnnnnnnnnnnnnnnnnnnnnnnnnnnnnnnnnnnnnnnnnnnnnnnnnnnnnnnnnnnnnnnnnnnnnnnnnnnnnnnnnnnnnnnnnnnnnnnnnnnnnnnnnnnnnnnnnnnnnnnnnnnnnnnnnnnnnnnnnnnnnnnnnnnnnnnnnnnnnnnnnnnnnnnnnnnnnnnnnnnnnnnnnnnnnnnnnnnnnnnnnnnnnnnnnnnnnnnnnnnnnnnnnnnnnnnnnnnnnnnnnnnnnnnnnnnnnnnnnnnnnnnnnnnnnnnnnnnnnnnnnnnnnnnnnnnnnnnnnnnnnnnnnnnnnnnnnnnnnnnnnnnnnnnnnnnnnnnnnnnnnnnnnnnnnnnnnnnnnnnnnnnnnnnnnnnnnnnnnnnnnnnnnnnnnnnnnnnnnnnnnnnnnnnnnnnnnnnnnnnnnnnnnnnnnnnnnnnnnnnnnnnnnnnnnnnnnnnnnnnnnnnnnnnnnnnnnnnnnnnnnnnnnnnnnnnnnnnnnnnnnnnnnnnnnnnnnnnnnnnnnnnnnnnnnnnnnnnnnnnnnnnnnnnnnnnnnnnnnnnnnnnnnnnnnnnnnnnnnnnnnnnnnnnnnnnnnnnnnnnnnnnnnnnnnnnnnnnnnnnnnnnnnnnnnnnnnnnnnnnnnnnnnnnnnnnnnnnnnnnnnnnnnnnnnnnnnnnnnnnnnnnnnnnnnnnnnnnnnnnnnnnnnnnnnnnnnnnnnnnnnnnnnnnnnnnnnnnnnnnnnnnnnnnnnnnnnnnnnnnnnnnnnnnnnnnnnnnnnnnnnnnnnnnnnnnnnnnnnnnnnnnnnnnnnnnnnnnnnnnnnnnnnnnnnnnnnnnnnnnnnnnnnnnnnnnnnnnnnnnnnnnnnnnnnnnnnnnnnnnnnnnnnnnnnnnnnnnnnnnnnnnnnnnnnnnnnnnnnnnnnnnnnnnnnnnnnnnnnnnnnnnnnnnnnnnnnnnnnnnnnnnnnnnnnnnnnnnnnnnnnnnnnnnnnnnnnnnnnnnnnnnnnnnnnnnnnnnnnnnnnnnnnnnnnnnnnnnnnnnnnnnnnnnnnnnnnnnnnnnnnnnnnnnnnnnnnnnnnnnnnnnnnnnnnnnnnnnnnnnnnnnnnnnnnnnnnnnnnnnnnnnnnnnnnnnnnnnnnnnnnnnnnnnnnnnnnnnnnnnnnnnnnnnnnnnnnnnnnnnnnnnnnnnnnnnnnnnnnnnnnnnnnnnnnnnnnnnnnnnnnnnnnnnnnnnnnnnnnnnnnnnnnnnnnnnnnnnnnnnnnnnnnnnnnnnnnnnnnnnnnnnnnnnnnnnnnnnnnnnnnnnnnnnnnnnnnnnnnnnnnnnnnnnnnnnnnnnnnnnnnnnnnnnnnnnnnnnnnnnnnnnnnnnnnnnnnnnnnnnnnnnnnnnnnnnnnnnnnnnnnnnnnnnnnnnnnnnnnnnnnnnnnnnnnnnnnnnnnnnnnnnnnnnnnnnnnnnnnnnnnnnnnnnnnnnnnnnnnnnnnnnnnnnnnnnnnnnnnnnnnnnnnnnnnnnnnnnnnnnnnnnnnnnnnnnnnnnnnnnnnnnnnnnnnnnnnnnnnnnnnnnnnnnnnnnnnnnnnnnnnnnnnnnnnnnnnnnnnnnnnnnnnnnnnnnnnnnnnnnnnnnnnnnnnnnnnnnnnnnnnnnnnnnnnnnnnnnnnnnnnnnnnnnnnnnnnnnnnnnnnnnnnnnnnnnnnnnnnnnnnnnnnnnnnnnnnnnnnnnnnnnnnnnnnnnnnnnnnnnnnnnnnnnnnnnnnnnnnnnnnnnnnnnnnnnnnnnnnnnnnnnnnnnnnnnnnnnnnnnnnnnnnnnnnnnnnnnnnnnnnnnnnnnnnnnnnnnnnnnnnnnnnnnnnnnnnnnnnnnnnnnnnnnnnnnnnnnnnnnnnnnnnnnnnnnnnnnnnnnnnnnnnnnnnnnnnnnnnnnnnnnnnnnnnnnnnnnnnnnnnnnnnnnnnnnnnnnnnnnnnnnnnnnnnnnnnnnnnnnnnnnnnnnnnnnnnnnnnnnnnnnnnnnnnnnnnnnnnnnnnnnnnnnnnnnnnnnnnnnnnnnnnnnnnnnnnnnnnnnnnnnnnnnnnnnnnnnnnnnnnnnnnnnnnnnnnnnnnnnnnnnnnnnnnnnnnnnnnnnnnnnnnnnnnnnnnnnnnnnnnnnnnnnnnnnnnnnnnnnnnnnnnnnnnnnnnnnnnnnnnnnnnnnnnnnnnnnnnnnnnnnnnnnnnnnnnnnnnnnnnnnnnnnnnnnnnnnnnnnnnnnnnnnnnnnnnnnnnnnnnnnnnnnnnnnnnnnnnnnnnnnnnnnnnnnnnnnnnnnnnnnnnnnnnnnnnnnnnnnnnnnnnnnnnnnnnnnnnnnnnnnnnnnnnnnnnnnnnnnnnnnnnnnnnnnnnnnnnnnnnnnnnnnnnnnnnnnnnnnnnnnnnnnnnnnnnnnnnnnnnnnnnnnnnnnnnnnnnnnnnnnnnnnnnnnnnnnnnnnnnnnnnnnnnnnnnnnnnnnnnnnnnnnnnnnnnnnnnnnnnnnnnnnnnnnnnnnnnnnnnnnnnnnnnnnnnnnnnnnnnnnnnnnnnnnnnnnnnnnnnnnnnnnnnnnnnnnnnnnnnnnnnnnnnnnnnnnnnnnnnnnnnnnnnnnnnnnnnnnnnnnnnnnnnnnnnnnnnnnnnnnnnnnnnnnnnnnnnnnnnnnnnnnnnnnnnnnnnnnnnnnnnnnnnnnnnnnnnnnnnnnnnnnnnnnnnnnnnnnnnnnnnnnnnnnnnnnnnnnnnnnnnnnnnnnnnnnnnnnnnnnnnnnnnnnnnnnnnnnnnnnnnnnnnnnnnnnnnnnnnnnnnnnnnnnnnnnnnnnnnnnnnnnnnnnnnnnnnnnnnnnnnnnnnnnnnnnnnnnnnnnnnnnnnnnnnnnnnnnnnnnnnnnnnnnnnnnnnnnnnnnnnnnnnnnnnnnnnnnnnnnnnnnnnnnnnnnnnnnnnnnnnnnnnnnnnnnnnnnnnnnnnnnnnnnnnnnnnnnnnnnnnnnnnnnnnnnnnnnnnnnnnnnnnnnnnnnnnnnnnnnnnnnnnnnnnnnnnnnnnnnnnnnnnnnnnnnnnnnnnnnnnnnnnnnnnnnnnnnnnnnnnnnnnnnnnnnnnnnnnnnnnnnnnnnnnnnnnnnnnnnnnnnnnnnnnnnnnnnnnnnnnnnnnnnnnnnnnnnnnnnnnnnnnnnnnnnnnnnnnnnnnnnnnnnnnnnnnnnnnnnnnnnnnnnnnnnnnnnnnnnnnnnnnnnnnnnnnnnnnnnnnnnnnnnnnnnnnnnnnnnnnnnnnnnnnnnnnnnnnnnnnnnnnnnnnnnnnnnnnnnnnnnnnnnnnnnnnnnnnnnnnnnnnnnnnnnnnnnnnnnnnnnnnnnnnnnnnnnnnnnnnnnnnnnnnnnnnnnnnnnnnnnnnnnnnnnnnnnnnnnnnnnnnnnnnnnnnnnnnnnnnnnnnnnnnnnnnnnnnnnnnnnnnnnnnnnnnnnnnnnnnnnnnnnnnnnnnnnnnnnnnnnnnnnnnnnnnnnnnnnnnnnnnnnnnnnnnnnnnnnnnnnnnnnnnnnnnnnnnnnnnnnnnnnnnnnnnnnnnnnnnnnnnnnnnnnnnnnnnnnnnnnnnnnnnnnnnnnnnnnnnnnnnnnnnnnnnnnnnnnnnnnnnnnnnnnnnnnnnnnnnnnnnnnnnnnnnnnnnnnnnnnnnnnnnnnnnnnnnnnnnnnnnnnnnnnnnnnnnnnnnnnnnnnnnnnnnnnnnnnnnnnnnnnnnnnnnnnnnnnnnnnnnnnnnnnnnnnnnnnnnnnnnnnnnnnnnnnnnnnnnnnnnnnnnnnnnnnnnnnnnnnnnnnnnnnnnnnnnnnnnnnnnnnnnnnnnnnnnnnnnnnnnnnnnnnnnnnnnnnnnnnnnnnnnnnnnnnnnnnnnnnnnnnnnnnnnnnnnnnnnnnnnnnnnnnnnnnnnnnnnnnnnnnnnnnnnnnnnnnnnnnnnnnnnnnnnnnnnnnnnnnnnnnnnnnnnnnnnnnnnnnnnnnnnnnnnnnnnnnnnnnnnnnnnnnnnnnnnnnnnnnnnnnnnnnnnnnnnnnnnnnnnnnnnnnnnnnnnnnnnnnnnnnnnnnnnnnnnnnnnnnnnnnnnnnnnnnnnnnnnnnnnnnnnnnnnnnnnnnnnnnnnnnnnnnnnnnnnnnnnnnnnnnnnnnnnnnnnnnnnnnnnnnnnnnnnnnnnnnnnnnnnnnnnnnnnnnnnnnnnnnnnnnnnnnnnnnnnnnnnnnnnnnnnnnnnnnnnnnnnnnnnnnnnnnnnnnnnnnnnnnnnnnnnnnnnnnnnnnnnnnnnnnnnnnnnnnnnnnnnnnnnnnnnnnnnnnnnnnnnnnnnnnnnnnnnnnnnnnnnnnnnnnnnnnnnnnnnnnnnnnnnnnnnnnnnnnnnnnnnnnnnnnnnnnnnnnnnnnnnnnnnnnnnnnnnnnnnnnnnnnnnnnnnnnnnnnnnnnnnnnnnnnnnnnnnnnnnnnnnnnnnnnnnnnnnnnnnnnnnnnnnnnnnnnnnnnnnnnnnnnnnnnnnnnnnnnnnnnnnnnnnnnnnnnnnnnnnnnnnnnnnnnnnnnnnnnnnnnnnnnnnnnnnnnnnnnnnnnnnnnnnnnnnnnnnnnnnnnnnnnnnnnnnnnnnnnnnnnnnnnnnnnnnnnnnnnnnnnnnnnnnnnnnnnnnnnnnnnnnnnnnnnnnnnnnnnnnnnnnnnnnnnnnnnnnnnnnnnnnnnnnnnnnnnnnnnnnnnnnnnnnnnnnnnnnnnnnnnnnnnnnnnnnnnnnnnnnnnnnnnnnnnnnnnnnnnnnnnnnnnnnnnnnnnnnnnnnnnnnnnnnnnnnnnnnnnnnnnnnnnnnnnnnnnnnnnnnnnnnnnnnnnnnnnnnnnnnnnnnnnnnnnnnnnnnnnnnnnnnnnnnnnnnnnnnnnnnnnnnnnnnnnnnnnnnnnnnnnnnnnnnnnnnnnnnnnnnnnnnnnnnnnnnnnnnnnnnnnnnnnnnnnnnnnnnnnnnnnnnnnnnnnnnnnnnnnnnnnnnnnnnnnnnnnnnnnnnnnnnnnnnnnnnnnnnnnnnnnnnnnnnnnnnnnnnnnnnnnnnnnnnnnnnnnnnnnnnnnnnnnnnnnnnnnnnnnnnnnnnnnnnnnnnnnnnnnnnnnnnnnnnnnnnnnnnnnnnnnnnnnnnnnnnnnnnnnnnnnnnnnnnnnnnnnnnnnnnnnnnnnnnnnnnnnnnnnnnnnnnnnnnnnnnnnnnnnnnnnnnnnnnnnnnnnnnnnnnnnnnnnnnnnnnnnnnnnnnnnnnnnnnnnnnnnnnnnnnnnnnnnnnnnnnnnnnnnnnnnnnnnnnnnnnnnnnnnnnnnnnnnnnnnnnnnnnnnnnnnnnnnnnnnnnnnnnnnnnnnnnnnnnnnnnnnnnnnnnnnnnnnnnnnnnnnnnnnnnnnnnnnnnnnnnnnnnnnnnnnnnnnnnnnnnnnnnnnnnnnnnnnnnnnnnnnnnnnnnnnnnnnnnnnnnnnnnnnnnnnnnnnnnnnnnnnnnnnnnnnnnnnnnnnnnnnnnnnnnnnnnnnnnnnnnnnnnnnnnnnnnnnnnnnnnnnnnnnnnnnnnnnnnnnnnnnnnnnnnnnnnnnnnnnnnnnnnnnnnnnnnnnnnnnnnnnnnnnnnnnnnnnnnnnnnnnnnnnnnnnnnnnnnnnnnnnnnnnnnnnnnnnnnnnnnnnnnnnnnnnnnnnnnnnnnnnnnnnnnnnnnnnnnnnnnnnnnnnnnnnnnnnnnnnnnnnnnnnnnnnnnnnnnnnnnnnnnnnnnnnnnnnnnnnnnnnnnnnnnnnnnnnnnnnnnnnnnnnnnnnnnnnnnnnnnnnnnnnnnnnnnnnnnnnnnnnnnnnnnnnnnnnnnnnnnnnnnnnnnnnnnnnnnnnnnnnnnnnnnnnnnnnnnnnnnnnnnnnnnnnnnnnnnnnnnnnnnnnnnnnnnnnnnnnnnnnnnnnnnnnnnnnnnnnnnnnnnnnnnnnnnnnnnnnnnnnnnnnnnnnnnnnnnnnnnnnnnnnnnnnnnnnnnnnnnnnnnnnnnnnnnnnnnnnnnnnnnnnnnnnnnnnnnnnnnnnnnnnnnnnnnnnnnnnnnnnnnnnnnnnnnnnnnnnnnnnnnnnnnnnnnnnnnnnnnnnnnnnnnnnnnnnnnnnnnnnnnnnnnnnnnnnnnnnnnnnnnnnnnnnnnnnnnnnnnnnnnnnnnnnnnnnnnnnnnnnnnnnnnnnnnnnnnnnnnnnnnnnnnnnnnnnnnnnnnnnnnnnnnnnnnnnnnnnnnnnnnnnnnnnnnnnnnnnnnnnnnnnnnnnnnnnnnnnnnnnnnnnnnnnnnnnnnnnnnnnnnnnnnnnnnnnnnnnnnnnnnnnnnnnnnnnnnnnnnnnnnnnnnnnnnnnnnnnnnnnnnnnnnnnnnnnnnnnnnnnnnnnnnnnnnnnnnnnnnnnnnnnnnnnnnnnnnnnnnnnnnnnnnnnnnnnnnnnnnnnnnnnnnnnnnnnnnnnnnnnnnnnnnnnnnnnnnnnnnnnnnnnnnnnnnnnnnnnnnnnnnnnnnnnnnnnnnnnnnnnnnnnnnnnnnnnnnnnnnnnnnnnnnnnnnnnnnnnnnnnnnnnnnnnnnnnnnnnnnnnnnnnnnnnnnnnnnnnnnnnnnnnnnnnnnnnnnnnnnnnnnnnnnnnnnnnnnnnnnnnnnnnnnnnnnnnnnnnnnnnnnnnnnnnnnnnnnnnnnnnnnnnnnnnnnnnnnnnnnnnnnnnnnnnnnnnnnnnnnnnnnnnnnnnnnnnnnnnnnnnnnnnnnnnnnnnnnnnnnnnnnnnnnnnnnnnnnnnnnnnnnnnnnnnnnnnnnnnnnnnnnnnnnnnnnnnnnnnnnnnnnnnnnnnnnnnnnnnnnnnnnnnnnnnnnnnnnnnnnnnnnnnnnnnnnnnnnnnnnnnnnnnnnnnnnnnnnnnnnnnnnnnnnnnnnnnnnnnnnnnnnnnnnnnnnnnnnnnnnnnnnnnnnnnnnnnnnnnnnnnnnnnnnnnnnnnnnnnnnnnnnnnnnnnnnnnnnnnnnnnnnnnnnnnnnnnnnnnnnnnnnnnnnnnnnnnnnnnnnnnnnnnnnnnnnnnnnnnnnnnnnnnnnnnnnnnnnnnnnnnnnnnnnnnnnnnnnnnnnnnnnnnnnnnnnnnnnnnnnnnnnnnnnnnnnnnnnnnnnnnnnnnnnnnnnnnnnnnnnnnnnnnnnnnnnnnnnnnnnnnnnnnnnnnnnnnnnnnnnnnnnnnnnnnnnnnnnnnnnnnnnnnnnnnnnnnnnnnnnnnnnnnnnnnnnnnnnnnnnnnnnnnnnnnnnnnnnnnnnnnnnnnnnnnnnnnnnnnnnnnnnnnnnnnnnnnnnnnnnnnnnnnnnnnnnnnnnnnnnnnnnnnnnnnnnnnnnnnnnnnnnnnnnnnnnnnnnnnnnnnnnnnnnnnnnnnnnnnnnnnnnnnnnnnnnnnnnnnnnnnnnnnnnnnnnnnnnnnnnnnnnnnnnnnnnnnnnnnnnnnnnnnnnnnnnnnnnnnnnnnnnnnnnnnnnnnnnnnnnnnnnnnnnnnnnnnnnnnnnnnnnnnnnnnnnnnnnnnnnnnnnnnnnnnnnnnnnnnnnnnnnnnnnnnnnnnnnnnnnnnnnnnnnnnnnnnnnnnnnnnnnnnnnnnnnnnnnnnnnnnnnnnnnnnnnnnnnnnnnnnnnnnnnnnnnnnnnnnnnnnnnnnnnnnnnnnnnnnnnnnnnnnnnnnnnnnnnnnnnnnnnnnnnnnnnnnnnnnnnnnnnnnnnnnnnnnnnnnnnnnnnnnnnnnnnnnnnnnnnnnnnnnnnnnnnnnnnnnnnnnnnnnnnnnnnnnnnnnnnnnnnnnnnnnnnnnnnnnnnnnnnnnnnnnnnnnnnnnnnnnnnnnnnnnnnnnnnnnnnnnnnnnnnnnnnnnnnnnnnnnnnnnnnnnnnnnnnnnnnnnnnnnnnnnnnnnnnnnnnnnnnnnnnnnnnnnnnnnnnnnnnnnnnnnnnnnnnnnnnnnnnnnnnnnnnnnnnnnnnnnnnnnnnnnnnnnnnnnnnnnnnnnnnnnnnnnnnnnnnnnnnnnnnnnnnnnnnnnnnnnnnnnnnnnnnnnnnnnnnnnnnnnnnnnnnnnnnnnnnnnnnnnnnnnnnnnnnnnnnnnnnnnnnnnnnnnnnnnnnnnnnnnnnnnnnnnnnnnnnnnnnnnnnnnnnnnnnnnnnnnnnnnnnnnnnnnnnnnnnnnnnnnnnnnnnnnnnnnnnnnnnnnnnnnnnnnnnnnnnnnnnnnnnnnnnnnnnnnnnnnnnnnnnnnnnnnnnnnnnnnnnnnnnnnnnnnnnnnnnnnnnnnnnnnnnnnnnnnnnnnnnnnnnnnnnnnnnnnnnnnnnnnnnnnnnnnnnnnnnnnnnnnnnnnnnnnnnnnnnnnnnnnnnnnnnnnnnnnnnnnnnnnnnnnnnnnnnnnnnnnnnnnnnnnnnnnnnnnnnnnnnnnnnnnnnnnnnnnnnnnnnnnnnnnnnnnnnnnnnnnnnnnnnnnnnnnnnnnnnnnnnnnnnnnnnnnnnnnnnnnnnnnnnnnnnnnnnnnnnnnnnnnnnnnnnnnnnnnnnnnnnnnnnnnnnnnnnnnnnnnnnnnnnnnnnnnnnnnnnnnnnnnnnnnnnnnnnnnnnnnnnnnnnnnnnnnnnnnnnnnnnnnnnnnnnnnnnnnnnnnnnnnnnnnnnnnnnnnnnnnnnnnnnnnnnnnnnnnnnnnnnnnnnnnnnnnnnnnnnnnnnnnnnnnnnnnnnnnnnnnnnnnnnnnnnnnnnnnnnnnnnnnnnnnnnnnnnnnnnnnnnnnnnnnnnnnnnnnnnnnnnnnnnnnnnnnnnnnnnnnnnnnnnnnnnnnnnnnnnnnnnnnnnnnnnnnnnnnnnnnnnnnnnnnnnnnnnnnnnnnnnnnnnnnnnnnnnnnnnnnnnnnnnnnnnnnnnnnnnnnnnnnnnnnnnnnnnnnnnnnnnnnnnnnnnnnnnnnnnnnnnnnnnnnnnnnnnnnnnnnnnnnnnnnnnnnnnnnnnnnnnnnnnnnnnnnnnnnnnnnnnnnnnnnnnnnnnnnnnnnnnnnnnnnnnnnnnnnnnnnnnnnnnnnnnnnnnnnnnnnnnnnnnnnnnnnnnnnnnnnnnnnnnnnnnnnnnnnnnnnnnnnnnnnnnnnnnnnnnnnnnnnnnnnnnnnnnnnnnnnnnnnnnnnnnnnnnnnnnnnnnnnnnnnnnnnnnnnnnnnnnnnnnnnnnnnnnnnnnnnnnnnnnnnnnnnnnnnnnnnnnnnnnnnnnnnnnnnnnnnnnnnnnnnnnnnnnnnnnnnnnnnnnnnnnnnnnnnnnnnnnnnnnnnnnnnnnnnnnnnnnnnnnnnnnnnnnnnnnnnnnnnnnnnnnnnnnnnnnnnnnnnnnnnnnnnnnnnnnnnnnnnnnnnnnnnnnnnnnnnnnnnnnnnnnnnnnnnnnnnnnnnnnnnnnnnnnnnnnnnnnnnnnnnnnnnnnnnnnnnnnnnnnnnnnnnnnnnnnnnnnnnnnnnnnnnnnnnnnnnnnnnnnnnnnnnnnnnnnnnnnnnnnnnnnnnnnnnnnnnnnnnnnnnnnnnnnnnnnnnnnnnnnnnnnnnnnnnnnnnnnnnnnnnnnnnnnnnnnnnnnnnnnnnnnnnnnnnnnnnnnnnnnnnnnnnnnnnnnnnnnnnnnnnnnnnnnnnnnnnnnnnnnnnnnnnnnnnnnnnnnnnnnnnnnnnnnnnnnnnnnnnnnnnnnnnnnnnnnnnnnnnnnnnnnnnnnnnnnnnnnnnnnnnnnnnnnnnnnnnnnnnnnnnnnnnnnnnnnnnnnnnnnnnnnnnnnnnnnnnnnnnnnnnnnnnnnnnnnnnnnnnnnnnnnnnnnnnnnnnnnnnnnnnnnnnnnnnnnnnnnnnnnnnnnnnnnnnnnnnnnnnnnnnnnnnnnnnnnnnnnnnnnnnnnnnnnnnnnnnnnnnnnnnnnnnnnnnnnnnnnnnnnnnnnnnnnnnnnnnnnnnnnnnnnnnnnnnnnnnnnnnnnnnnnnnnnnnnnnnnnnnnnnnnnnnnnnnnnnnnnnnnnnnnnnnnnnnnnnnnnnnnnnnnnnnnnnnnnnnnnnnnnnnnnnnnnnnnnnnnnnnnnnnnnnnnnnnnnnnnnnnnnnnnnnnnnnnnnnnnnnnnnnnnnnnnnnnnnnnnnnnnnnnnnnnnnnnnnnnnnnnnnnnnnnnnnnnnnnnnnnnnnnnnnnnnnnnnnnnnnnnnnnnnnnnnnnnnnnnnnnnnnnnnnnnnnnnnnnnnnnnnnnnnnnnnnnnnnnnnnnnnnnnnnnnnnnnnnnnnnnnnnnnnnnnnnnnnnnnnnnnnnnnnnnnnnnnnnnnnnnnnnnnnnnnnnnnnnnnnnnnnnnnnnnnnnnnnnnnnnnnnnnnnnnnnnnnnnnnnnnnnnnnnnnnnnnnnnnnnnnnnnnnnnnnnnnnnnnnnnnnnnnnnnnnnnnnnnnnnnnnnnnnnnnnnnnnnnnnnnnnnnnnnnnnnnnnnnnnnnnnnnnnnnnnnnnnnnnnnnnnnnnnnnnnnnnnnnnnnnnnnnnnnnnnnnnnnnnnnnnnnnnnnnnnnnnnnnnnnnnnnnnnnnnnnnnnnnnnnnnnnnnnnnnnnnnnnnnnnnnnnnnnnnnnnnnnnnnnnnnnnnnnnnnnnnnnnnnnnnnnnnnnnnnnnnnnnnnnnnnnnnnnnnnnnnnnnnnnnnnnnnnnnnnnnnnnnnnnnnnnnnnnnnnnnnnnnnnnnnnnnnnnnnnnnnnnnnnnnnnnnnnnnnnnnnnnnnnnnnnnnnnnnnnnnnnnnnnnnnnnnnnnnnnnnnnnnnnnnnnnnnnnnnnnnnnnnnnnnnnnnnnnnnnnnnnnnnnnnnnnnnnnnnnnnnnnnnnnnnnnnnnnnnnnnnnnnnnnnnnnnnnnnnnnnnnnnnnnnnnnnnnnnnnnnnnnnnnnnnnnnnnnnnnnnnnnnnnnnnnnnnnnnnnnnnnnnnnnnnnnnnnnnnnnnnnnnnnnnnnnnnnnnnnnnnnnnnnnnnnnnnnnnnnnnnnnnnnnnnnnnnnnnnnnnnnnnnnnnnnnnnnnnnnnnnnnnnnnnnnnnnnnnnnnnnnnnnnnnnnnnnnnnnnnnnnnnnnnnnnnnnnnnnnnnnnnnnnnnnnnnnnnnnnnnnnnnnnnnnnnnnnnnnnnnnnnnnnnnnnnnnnnnnnnnnnnnnnnnnnnnnnnnnnnnnnnnnnnnnnnnnnnnnnnnnnnnnnnnnnnnnnnnnnnnnnnnnnnnnnnnnnnnnnnnnnnnnnnnnnnnnnnnnnnnnnnnnnnnnnnnnnnnnnnnnnnnnnnnnnnnnnnnnnnnnnnnnnnnnnnnnnnnnnnnnnnnnnnnnnnnnnnnnnnnnnnnnnnnnnnnnnnnnnnnnnnnnnnnnnnnnnnnnnnnnnnnnnnnnnnnnnnnnnnnnnnnnnnnnnnnnnnnnnnnnnnnnnnnnnnnnnnnnnnnnnnnnnnnnnnnnnnnnnnnnnnnnnnnnnnnnnnnnnnnnnnnnnnnnnnnnnnnnnnnnnnnnnnnnnnnnnnnnnnnnnnnnnnnnnnnnnnnnnnnnnnnnnnnnnnnnnnnnnnnnnnnnnnnnnnnnnnnnnnnnnnnnnnnnnnnnnnnnnnnnnnnnnnnnnnnnnnnnnnnnnnnnnnnnnnnnnnnnnnnnnnnnnnnnnnnnnnnnnnnnnnnnnnnnnnnnnnnnnnnnnnnnnnnnnnnnnnnnnnnnnnnnnnnnnnnnnnnnnnnnnnnnnnnnnnnnnnnnnnnnnnnnnnnnnnnnnnnnnnnnnnnnnnnnnnnnnnnnnnnnnnnnnnnnnnnnnnnnnnnnnnnnnnnnnnnnnnnnnnnnnnnnnnnnnnnnnnnnnnnnnnnnnnnnnnnnnnnnnnnnnnnnnnnnnnnnnnnnnnnnnnnnnnnnnnnnnnnnnnnnnnnnnnnnnnnnnnnnnnnnnnnnnnnnnnnnnnnnnnnnnnnnnnnnnnnnnnnnnnnnnnnnnnnnnnnnnnnnnnnnnnnnnnnnnnnnnnnnnnnnnnnnnnnnnnnnnnnnnnnnnnnnnnnnnnnnnnnnnnnnnnnnnnnnnnnnnnnnnnnnnnnnnnnnnnnnnnnnnnnnnnnnnnnnnnnnnnnnnnnnnnnnnnnnnnnnnnnnnnnnnnnnnnnnnnnnnnnnnnnnnnnnnnnnnnnnnnnnnnnnnnnnnnnnnnnnnnnnnnnnnnnnnnnnnnnnnnnnnnnnnnnnnnnnnnnnnnnnnnnnnnnnnnnnnnnnnnnnnnnnnnnnnnnnnnnnnnnnnnnnnnnnnnnnnnnnnnnnnnnnnnnnnnnnnnnnnnnnnnnnnnnnnnnnnnnnnnnnnnnnnnnnnnnnnnnnnnnnnnnnnnnnnnnnnnnnnnnnnnnnnnnnnnnnnnnnnnnnnnnnnnnnnnnnnnnnnnnnnnnnnnnnnnnnnnnnnnnnnnnnnnnnnnnnnnnnnnnnnnnnnnnnnnnnnnnnnnnnnnnnnnnnnnnnnnnnnnnnnnnnnnnnnnnnnnnnnnnnnnnnnnnnnnnnnnnnnnnnnnnnnnnnnnnnnnnnnnnnnnnnnnnnnnnnnnnnnnnnnnnnnnnnnnnnnnnnnnnnnnnnnnnnnnnnnnnnnnnnnnnnnnnnnnnnnnnnnnnnnnnnnnnnnnnnnnnnnnnnnnnnnnnnnnnnnnnnnnnnnnnnnnnnnnnnnnnnnnnnnnnnnnnnnnnnnnnnnnnnnnnnnnnnnnnnnnnnnnnnnnnnnnnnnnnnnnnnnnnnnnnnnnnnnnnnnnnnnnnnnnnnnnnnnnnnnnnnnnnnnnnnnnnnnnnnnnnnnnnnnnnnnnnnnnnnnnnnnnnnnnnnnnnnnnnnnnnnnnnnnnnnnnnnnnnnnnnnnnnnnnnnnnnnnnnnnnnnnnnnnnnnnnnnnnnnnnnnnnnnnnnnnnnnnnnnnnnnnnnnnnnnnnnnnnnnnnnnnnnnnnnnnnnnnnnnnnnnnnnnnnnnnnnnnnnnnnnnnnnnnnnnnnnnnnnnnnnnnnnnnnnnnnnnnnnnnnnnnnnnnnnnnnnnnnnnnnnnnnnnnnnnnnnnnnnnnnnnnnnnnnnnnnnnnnnnnnnnnnnnnnnnnnnnnnnnnnnnnnnnnnnnnnnnnnnnnnnnnnnnnnnnnnnnnnnnnnnnnnnnnnnnnnnnnnnnnnnnnnnnnnnnnnnnnnnnnnnnnnnnnnnnnnnnnnnnnnnnnnnnnnnnnnnnnnnnnnnnnnnnnnnnnnnnnnnnnnnnnnnnnnnnnnnnnnnnnnnnnnnnnnnnnnnnnnnnnnnnnnnnnnnnnnnnnnnnnnnnnnnnnnnnnnnnnnnnnnnnnnnnnnnnnnnnnnnnnnnnnnnnnnnnnnnnnnnnnnnnnnnnnnnnnnnnnnnnnnnnnnnnnnnnnnnnnnnnnnnnnnnnnnnnnnnnnnnnnnnnnnnnnnnnnnnnnnnnnnnnnnnnnnnnnnnnnnnnnnnnnnnnnnnnnnnnnnnnnnnnnnnnnnnnnnnnnnnnnnnnnnnnnnnnnnnnnnnnnnnnnnnnnnnnnnnnnnnnnnnnnnnnnnnnnnnnnnnnnnnnnnnnnnnnnnnnnnnnnnnnnnnnnnnnnnnnnnnnnnnnnnnnnnnnnnnnnnnnnnnnnnnnnnnnnnnnnnnnnnnnnnnnnnnnnnnnnnnnnnnnnnnnnnnnnnnnnnnnnnnnnnnnnnnnnnnnnnnnnnnnnnnnnnnnnnnnnnnnnnnnnnnnnnnnnnnnnnnnnnnnnnnnnnnnnnnnnnnnnnnnnnnnnnnnnnnnnnnnnnnnnnnnnnnnnnnnnnnnnnnnnnnnnnnnnnnnnnnnnnnnnnnnnnnnnnnnnnnnnnnnnnnnnnnnnnnnnnnnnnnnnnnnnnnnnnnnnnnnnnnnnnnnnnnnnnnnnnnnnnnnnnnnnnnnnnnnnnnnnnnnnnnnnnnnnnnnnnnnnnnnnnnnnnnnnnnnnnnnnnnnnnnnnnnnnnnnnnnnnnnnnnnnnnnnnnnnnnnnnnnnnnnnnnnnnnnnnnnnnnnnnnnnnnnnnnnnnnnnnnnnnnnnnnnnnnnnnnnnnnnnnnnnnnnnnnnnnnnnnnnnnnnnnnnnnnnnnnnnnnnnnnnnnnnnnnnnnnnnnnnnnnnnnnnnnnnnnnnnnnnnnnnnnnnnnnnnnnnnnnnnnnnnnnnnnnnnnnnnnnnnnnnnnnnnnnnnnnnnnnnnnnnnnnnnnnnnnnnnnnnnnnnnnnnnnnnnnnnnnnnnnnnnnnnnnnnnnnnnnnnnnnnnnnnnnnnnnnnnnnnnnnnnnnnnnnnnnnnnnnnnnnnnnnnnnnnnnnnnnnnnnnnnnnnnnnnnnnnnnnnnnnnnnnnnnnnnnnnnnnnnnnnnnnnnnnnnnnnnnnnnnnnnnnnnnnnnnnnnnnnnnnnnnnnnnnnnnnnnnnnnnnnnnnnnnnnnnnnnnnnnnnnnnnnnnnnnnnnnnnnnnnnnnnnnnnnnnnnnnnnnnnnnnnnnnnnnnnnnnnnnnnnnnnnnnnnnnnnnnnnnnnnnnnnnnnnnnnnnnnnnnnnnnnnnnnnnnnnnnnnnnnnnnnnnnnnnnnnnnnnnnnnnnnnnnnnnnnnnnnnnnnnnnnnnnnnnnnnnnnnnnnnnnnnnnnnnnnnnnnnnnnnnnnnnnnnnnnnnnnnnnnnnnnnnnnnnnnnnnnnnnnnnnnnnnnnnnnnnnnnnnnnnnnnnnnnnnnnnnnnnnnnnnnnnnnnnnnnnnnnnnnnnnnnnnnnnnnnnnnnnnnnnnnnnnnnnnnnnnnnnnnnnnnnnnnnnnnnnnnnnnnnnnnnnnnnnnnnnnnnnnnnnnnnnnnnnnnnnnnnnnnnnnnnnnnnnnnnnnnnnnnnnnnnnnnnnnnnnnnnnnnnnnnnnnnnnnnnnnnnnnnnnnnnnnnnnnnnnnnnnnnnnnnnnnnnnnnnnnnnnnnnnnnnnnnnnnnnnnnnnnnnnnnnnnnnnnnnnnnnnnnnnnnnnnnnnnnnnnnnnnnnnnnnnnnnnnnnnnnnnnnnnnnnnnnnnnnnnnnnnnnnnnnnnnnnnnnnnnnnnnnnnnnnnnnnnnnnnnnnnnnnnnnnnnnnnnnnnnnnnnnnnnnnnnnnnnnnnnnnnnnnnnnnnnnnnnnnnnnnnnnnnnnnnnnnnnnnnnnnnnnnnnnnnnnnnnnnnnnnnnnnnnnnnnnnnnnnnnnnnnnnnnnnnnnnnnnnnnnnnnnnnnnnnnnnnnnnnnnnnnnnnnnnnnnnnnnnnnnnnnnnnnnnnnnnnnnnnnnnnnnnnnnnnnnnnnnnnnnnnnnnnnnnnnnnnnnnnnnnnnnnnnnnnnnnnnnnnnnnnnnnnnnnnnnnnnnnnnnnnnnnnnnnnnnnnnnnnnnnnnnnnnnnnnnnnnnnnnnnnnnnnnnnnnnnnnnnnnnnnnnnnnnnnnnnnnnnnnnnnnnnnnnnnnnnnnnnnnnnnnnnnnnnnnnnnnnnnnnnnnnnnnnnnnnnnnnnnnnnnnnnnnnnnnnnnnnnnnnnnnnnnnnnnnnnnnnnnnnnnnnnnnnnnnnnnnnnnnnnnnnnnnnnnnnnnnnnnnnnnnnnnnnnnnnnnnnnnnnnnnnnnnnnnnnnnnnnnnnnnnnnnnnnnnnnnnnnnnnnnnnnnnnnnnnnnnnnnnnnnnnnnnnnnnnnnnnnnnnnnnnnnnnnnnnnnnnnnnnnnnnnnnnnnnnnnnnnnnnnnnnnnnnnnnnnnnnnnnnnnnnnnnnnnnnnnnnnnnnnnnnnnnnnnnnnnnnnnnnnnnnnnnnnnnnnnnnnnnnnnnnnnnnnnnnnnnnnnnnnnnnnnnnnnnnnnnnnnnnnnnnnnnnnnnnnnnnnnnnnnnnnnnnnnnnnnnnnnnnnnnnnnnnnnnnnnnnnnnnnnnnnnnnnnnnnnnnnnnnnnnnnnnnnnnnnnnnnnnnnnnnnnnnnnnnnnnnnnnnnnnnnnnnnnnnnnnnnnnnnnnnnnnnnnnnnnnnnnnnnnnnnnnnnnnnnnnnnnnnnnnnnnnnnnnnnnnnnnnnnnnnnnnnnnnnnnnnnnnnnnnnnnnnnnnnnnnnnnnnnnnnnnnnnnnnnnnnnnnnnnnnnnnnnnnnnnnnnnnnnnnnnnnnnnnnnnnnnnnnnnnnnnnnnnnnnnnnnnnnnnnnnnnnnnnnnnnnnnnnnnnnnnnnnnnnnnnnnnnnnnnnnnnnnnnnnnnnnnnnnnnnnnnnnnnnnnnnnnnnnnnnnnnnnnnnnnnnnnnnnnnnnnnnnnnnnnnnnnnnnnnnnnnnnnnnnnnnnnnnnnnnnnnnnnnnnnnnnnnnnnnnnnnnnnnnnnnnnnnnnnnnnnnnnnnnnnnnnnnnnnnnnnnnnnnnnnnnnnnnnnnnnnnnnnnnnnnnnnnnnnnnnnnnnnnnnnnnnnnnnnnnnnnnnnnnnnnnnnnnnnnnnnnnnnnnnnnnnnnnnnnnnnnnnnnnnnnnnnnnnnnnnnnnnnnnnnnnnnnnnnnnnnnnnnnnnnnnnnnnnnnnnnnnnnnnnnnnnnnnnnnnnnnnnnnnnnnnnnnnnnnnnnnnnnnnnnnnnnnnnnnnnnnnnnnnnnnnnnnnnnnnnnnnnnnnnnnnnnnnnnnnnnnnnnnnnnnnnnnnnnnnnnnnnnnnnnnnnnnnnnnnnnnnnnnnnnnnnnnnnnnnnnnnnnnnnnnnnnnnnnnnnnnnnnnnnnnnnnnnnnnnnnnnnnnnnnnnnnnnnnnnnnnnnnnnnnnnnnnnnnnnnnnnnnnnnnnnnnnnnnnnnnnnnnnnnnnnnnnnnnnnnnnnnnnnnnnnnnnnnnnnnnnnnnnnnnnnnnnnnnnnnnnnnnnnnnnnnnnnnnnnnnnnnnnnnnnnnnnnnnnnnnnnnnnnnnnnnnnnnnnnnnnnnnnnnnnnnnnnnnnnnnnnnnnnnnnnnnnnnnnnnnnnnnnnnnnnnnnnnnnnnnnnnnnnnnnnnnnnnnnnnnnnnnnnnnnnnnnnnnnnnnnnnnnnnnnnnnnnnnnnnnnnnnnnnnnnnnnnnnnnnnnnnnnnnnnnnnnnnnnnnnnnnnnnnnnnnnnnnnnnnnnnnnnnnnnnnnnnnnnnnnnnnnnnnnnnnnnnnnnnnnnnnnnnnnnnnnnnnnnnnnnnnnnnnnnnnnnnnnnnnnnnnnnnnnnnnnnnnnnnnnnnnnnnnnnnnnnnnnnnnnnnnnnnnnnnnnnnnnnnnnnnnnnnnnnnnnnnnnnnnnnnnnnnnnnnnnnnnnnnnnnnnnnnnnnnnnnnnnnnnnnnnnnnnnnnnnnnnnnnnnnnnnnnnnnnnnnnnnnnnnnnnnnnnnnnnnnnnnnnnnnnnnnnnnnnnnnnnnnnnnnnnnnnnnnnnnnnnnnnnnnnnnnnnnnnnnnnnnnnnnnnnnnnnnnnnnnnnnnnnnnnnnnnnnnnnnnnnnnnnnnnnnnnnnnnnnnnnnnnnnnnnnnnnnnnnnnnnnnnnnnnnnnnnnnnnnnnnnnnnnnnnnnnnnnnnnnnnnnnnnnnnnnnnnnnnnnnnnnnnnnnnnnnnnnnnnnnnnnnnnnnnnnnnnnnnnnnnnnnnnnnnnnnnnnnnnnnnnnnnnnnnnnnnnnnnnnnnnnnnnnnnnnnnnnnnnnnnnnnnnnnnnnnnnnnnnnnnnnnnnnnnnnnnnnnnnnnnnnnnnnnnnnnnnnnnnnnnnnnnnnnnnnnnnnnnnnnnnnnnnnnnnnnnnnnnnnnnnnnnnnnnnnnnnnnnnnnnnnnnnnnnnnnnnnnnnnnnnnnnnnnnnnnnnnnnnnnnnnnnnnnnnnnnnnnnnnnnnnnnnnnnnnnnnnnnnnnnnnnnnnnnnnnnnnnnnnnnnnnnnnnnnnnnnnnnnnnnnnnnnnnnnnnnnnnnnnnnnnnnnnnnnnnnnnnnnnnnnnnnnnnnnnnnnnnnnnnnnnnnnnnnnnnnnnnnnnnnnnnnnnnnnnnnnnnnnnnnnnnnnnnnnnnnnnnnnnnnnnnnnnnnnnnnnnnnnnnnnnnnnnnnnnnnnnnnnnnnnnnnnnnnnnnnnnnnnnnnnnnnnnnnnnnnnnnnnnnnnnnnnnnnnnnnnnnnnnnnnnnnnnnnnnnnnnnnnnnnnnnnnnnnnnnnnnnnnnnnnnnnnnnnnnnnnnnnnnnnnnnnnnnnnnnnnnnnnnnnnnnnnnnnnnnnnnnnnnnnnnnnnnnnnnnnnnnnnnnnnnnnnnnnnnnnnnnnnnnnnnnnnnnnnnnnnnnnnnnnnnnnnnnnnnnnnnnnnnnnnnnnnnnnnnnnnnnnnnnnnnnnnnnnnnnnnnnnnnnnnnnnnnnnnnnnnnnnnnnnnnnnnnnnnnnnnnnnnnnnnnnnnnnnnnnnnnnnnnnnnnnnnnnnnnnnnnnnnnnnnnnnnnnnnnnnnnnnnnnnnnnnnnnnnnnnnnnnnnnnnnnnnnnnnnnnnnnnnnnnnnnnnnnnnnnnnnnnnnnnnnnnnnnnnnnnnnnnnnnnnnnnnnnnnnnnnnnnnnnnnnnnnnnnnnnnnnnnnnnnnnnnnnnnnnnnnnnnnnnnnnnnnnnnnnnnnnnnnnnnnnnnnnnnnnnnnnnnnnnnnnnnnnnnnnnnnnnnnnnnnnnnnnnnnnnnnnnnnnnnnnnnnnnnnnnnnnnnnnnnnnnnnnnnnnnnnnnnnnnnnnnnnnnnnnnnnnnnnnnnnnnnnnnnnnnnnnnnnnnnnnnnnnnnnnnnnnnnnnnnnnnnnnnnnnnnnnnnnnnnnnnnnnnnnnnnnnnnnnnnnnnnnnnnnnnnnnnnnnnnnnnnnnnnnnnnnnnnnnnnnnnnnnnnnnnnnnnnnnnnnnnnnnnnnnnnnnnnnnnnnnnnnnnnnnnnnnnnnnnnnnnnnnnnnnnnnnnnnnnnnnnnnnnnnnnnnnnnnnnnnnnnnnnnnnnnnnnnnnnnnnnnnnnnnnnnnnnnnnnnnnnnnnnnnnnnnnnnnnnnnnnnnnnnnnnnnnnnnnnnnnnnnnnnnnnnnnnnnnnnnnnnnnnnnnnnnnnnnnnnnnnnnnnnnnnnnnnnnnnnnnnnnnnnnnnnnnnnnnnnnnnnnnnnnnnnnnnnnnnnnnnnnnnnnnnnnnnnnnnnnnnnnnnnnnnnnnnnnnnnnnnnnnnnnnnnnnnnnnnnnnnnnnnnnnnnnnnnnnnnnnnnnnnnnnnnnnnnnnnnnnnnnnnnnnnnnnnnnnnnnnnnnnnnnnnnnnnnnnnnnnnnnnnnnnnnnnnnnnnnnnnnnnnnnnnnnnnnnnnnnnnnnnnnnnnnnnnnnnnnnnnnnnnnnnnnnnnnnnnnnnnnnnnnnnnnnnnnnnnnnnnnnnnnnnnnnnnnnnnnnnnnnnnnnnnnnnnnnnnnnnnnnnnnnnnnnnnnnnnnnnnnnnnnnnnnnnnnnnnnnnnnnnnnnnnnnnnnnnnnnnnnnnnnnnnnnnnnnnnnnnnnnnnnnnnnnnnnnnnnnnnnnnnnnnnnnnnnnnnnnnnnnnnnnnnnnnnnnnnnnnnnnnnnnnnnnnnnnnnnnnnnnnnnnnnnnnnnnnnnnnnnnnnnnnnnnnnnnnnnnnnnnnnnnnnnnnnnnnnnnnnnnnnnnnnnnnnnnnnnnnnnnnnnnnnnnnnnnnnnnnnnnnnnnnnnnnnnnnnnnnnnnnnnnnnnnnnnnnnnnnnnnnnnnnnnnnnnnnnnnnnnnnnnnnnnnnnnnnnnnnnnnnnnnnnnnnnnnnnnnnnnnnnnnnnnnnnnnnnnnnnnnnnnnnnnnnnnnnnnnnnnnnnnnnnnnnnnnnnnnnnnnnnnnnnnnnnnnnnnnnnnnnnnnnnnnnnnnnnnnnnnnnnnnnnnnnnnnnnnnnnnnnnnnnnnnnnnnnnnnnnnnnnnnnnnnnnnnnnnnnnnnnnnnnnnnnnnnnnnnnnnnnnnnnnnnnnnnnnnnnnnnnnnnnnnnnnnnnnnnnnnnnnnnnnnnnnnnnnnnnnnnnnnnnnnnnnnnnnnnnnnnnnnnnnnnnnnnnnnnnnnnnnnnnnnnnnnnnnnnnnnnnnnnnnnnnnnnnnnnnnnnnnnnnnnnnnnnnnnnnnnnnnnnnnnnnnnnnnnnnnnnnnnnnnnnnnnnnnnnnnnnnnnnnnnnnnnnnnnnnnnnnnnnnnnnnnnnnnnnnnnnnnnnnnnnnnnnnnnnnnnnnnnnnnnnnnnnnnnnnnnnnnnnnnnnnnnnnnnnnnnnnnnnnnnnnnnnnnnnnnnnnnnnnnnnnnnnnnnnnnnnnnnnnnnnnnnnnnnnnnnnnnnnnnnnnnnnnnnnnnnnnnnnnnnnnnnnnnnnnnnnnnnnnnnnnnnnnnnnnnnnnnnnnnnnnnnnnnnnnnnnnnnnnnnnnnnnnnnnnnnnnnnnnnnnnnnnnnnnnnnnnnnnnnnnnnnnnnnnnnnnnnnnnnnnnnnnnnnnnnnnnnnnnnnnnnnnnnnnnnnnnnnnnnnnnnnnnnnnnnnnnnnnnnnnnnnnnnnnnnnnnnnnnnnnnnnnnnnnnnnnnnnnnnnnnnnnnnnnnnnnnnnnnnnnnnnnnnnnnnnnnnnnnnnnnnnnnnnnnnnnnnnnnnnnnnnnnnnnnnnnnnnnnnnnnnnnnnnnnnnnnnnnnnnnnnnnnnnnnnnnnnnnnnnnnnnnnnnnnnnnnnnnnnnnnnnnnnnnnnnnnnnnnnnnnnnnnnnnnnnnnnnnnnnnnnnnnnnnnnnnnnnnnnnnnnnnnnnnnnnnnnnnnnnnnnnnnnnnnnnnnnnnnnnnnnnnnnnnnnnnnnnnnnnnnnnnnnnnnnnnnnnnnnnnnnnnnnnnnnnnnnnnnnnnnnnnnnnnnnnnnnnnnnnnnnnnnnnnnnnnnnnnnnnnnnnnnnnnnnnnnnnnnnnnnnnnnnnnnnnnnnnnnnnnnnnnnnnnnnnnnnnnnnnnnnnnnnnnnnnnnnnnnnnnnnnnnnnnnnnnnnnnnnnnnnnnnnnnnnnnnnnnnnnnnnnnnnnnnnnnnnnnnnnnnnnnnnnnnnnnnnnnnnnnnnnnnnnnnnnnnnnnnnnnnnnnnnnnnnnnnnnnnnnnnnnnnnnnnnnnnnnnnnnnnnnnnnnnnnnnnnnnnnnnnnnnnnnnnnnnnnnnnnnnnnnnnnnnnnnnnnnnnnnnnnnnnnnnnnnnnnnnnnnnnnnnnnnnnnnnnnnnnnnnnnnnnnnnnnnnnnnnnnnnnnnnnnnnnnnnnnnnnnnnnnnnnnnnnnnnnnnnnnnnnnnnnnnnnnnnnnnnnnnnnnnnnnnnnnnnnnnnnnnnnnnnnnnnnnnnnnnnnnnnnnnnnnnnnnnnnnnnnnnnnnnnnnnnnnnnnnnnnnnnnnnnnnnnnnnnnnnnnnnnnnnnnnnnnnnnnnnnnnnnnnnnnnnnnnnnnnnnnnnnnnnnnnnnnnnnnnnnnnnnnnnnnnnnnnnnnnnnnnnnnnnnnnnnnnnnnnnnnnnnnnnnnnnnnnnnnnnnnnnnnnnnnnnnnnnnnnnnnnnnnnnnnnnnnnnnnnnnnnnnnnnnnnnnnnnnnnnnnnnnnnnnnnnnnnnnnnnnnnnnnnnnnnnnnnnnnnnnnnnnnnnnnnnnnnnnnnnnnnnnnnnnnnnnnnnnnnnnnnnnnnnnnnnnnnnnnnnnnnnnnnnnnnnnnnnnnnnnnnnnnnnnnnnnnnnnnnnnnnnnnnnnnnnnnnnnnnnnnnnnnnnnnnnnnnnnnnnnnnnnnnnnnnnnnnnnnnnnnnnnnnnnnnnnnnnnnnnnnnnnnnnnnnnnnnnnnnnnnnnnnnnnnnnnnnnnnnnnnnnnnnnnnnnnnnnnnnnnnnnnnnnnnnnnnnnnnnnnnnnnnnnnnnnnnnnnnnnnnnnnnnnnnnnnnnnnnnnnnnnnnnnnnnnnnnnnnnnnnnnnnnnnnnnnnnnnnnnnnnnnnnnnnnnnnnnnnnnnnnnnnnnnnnnnnnnnnnnnnnnnnnnnnnnnnnnnnnnnnnnnnnnnnnnnnnnnnnnnnnnnnnnnnnnnnnnnnnnnnnnnnnnnnnnnnnnnnnnnnnnnnnnnnnnnnnnnnnnnnnnnnnnnnnnnnnnnnnnnnnnnnnnnnnnnnnnnnnnnnnnnnnnnnnnnnnnnnnnnnnnnnnnnnnnnnnnnnnnnnnnnnnnnnnnnnnnnnnnnnnnnnnnnnnnnnnnnnnnnnnnnnnnnnnnnnnnnnnnnnnnnnnnnnnnnnnnnnnnnnnnnnnnnnnnnnnnnnnnnnnnnnnnnnnnnnnnnnnnnnnnnnnnnnnnnnnnnnnnnnnnnnnnnnnnnnnnnnnnnnnnnnnnnnnnnnnnnnnnnnnnnnnnnnnnnnnnnnnnnnnnnnnnnnnnnnnnnnnnnnnnnnnnnnnnnnnnnnnnnnnnnnnnnnnnnnnnnnnnnnnnnnnnnnnnnnnnnnnnnnnnnnnnnnnnnnnnnnnnnnnnnnnnnnnnnnnnnnnnnnnnnnnnnnnnnnnnnnnnnnnnnnnnnnnnnnnnnnnnnnnnnnnnnnnnnnnnnnnnnnnnnnnnnnnnnnnnnnnnnnnnnnnnnnnnnnnnnnnnnnnnnnnnnnnnnnnnnnnnnnnnnnnnnnnnnnnnnnnnnnnnnnnnnnnnnnnnnnnnnnnnnnnnnnnnnnnnnnnnnnnnnnnnnnnnnnnnnnnnnnnnnnnnnnnnnnnnnnnnnnnnnnnnnnnnnnnnnnnnnnnnnnnnnnnnnnnnnnnnnnnnnnnnnnnnnnnnnnnnnnnnnnnnnnnnnnnnnnnnnnnnnnnnnnnnnnnnnnnnnnnnnnnnnnnnnnnnnnnnnnnnnnnnnnnnnnnnnnnnnnnnnnnnnnnnnnnnnnnnnnnnnnnnnnnnnnnnnnnnnnnnnnnnnnnnnnnnnnnnnnnnnnnnnnnnnnnnnnnnnnnnnnnnnnnnnnnnnnnnnnnnnnnnnnnnnnnnnnnnnnnnnnnnnnnnnnnnnnnnnnnnnnnnnnnnnnnnnnnnnnnnnnnnnnnnnnnnnnnnnnnnnnnnnnnnnnnnnnnnnnnnnnnnnnnnnnnnnnnnnnnnnnnnnnnnnnnnnnnnnnnnnnnnnnnnnnnnnnnnnnnnnnnnnnnnnnnnnnnnnnnnnnnnnnnnnnnnnnnnnnnnnnnnnnnnnnnnnnnnnnnnnnnnnnnnnnnnnnnnnnnnnnnnnnnnnnnnnnnnnnnnnnnnnnnnnnnnnnnnnnnnnnnnnnnnnnnnnnnnnnnnnnnnnnnnnnnnnnnnnnnnnnnnnnnnnnnnnnnnnnnnnnnnnnnnnnnnnnnnnnnnnnnnnnnnnnnnnnnnnnnnnnnnnnnnnnnnnnnnnnnnnnnnnnnnnnnnnnnnnnnnnnnnnnnnnnnnnnnnnnnnnnnnnnnnnnnnnnnnnnnnnnnnnnnnnnnnnnnnnnnnnnnnnnnnnnnnnnnnnnnnnnnnnnnnnnnnnnnnnnnnnnnnnnnnnnnnnnnnnnnnnnnnnnnnnnnnnnnnnnnnnnnnnnnnnnnnnnnnnnnnnnnnnnnnnnnnnnnnnnnnnnnnnnnnnnnnnnnnnnnnnnnnnnnnnnnnnnnnnnnnnnnnnnnnnnnnnnnnnnnnnnnnnnnnnnnnnnnnnnnnnnnnnnnnnnnnnnnnnnnnnnnnnnnnnnnnnnnnnnnnnnnnnnnnnnnnnnnnnnnnnnnnnnnnnnnnnnnnnnnnnnnnnnnnnnnnnnnnnnnnnnnnnnnnnnnnnnnnnnnnnnnnnnnnnnnnnnnnnnnnnnnnnnnnnnnnnnnnnnnnnnnnnnnnnnnnnnnnnnnnnnnnnnnnnnnnnnnnnnnnnnnnnnnnnnnnnnnnnnnnnnnnnnnnnnnnnnnnnnnnnnnnnnnnnnnnnnnnnnnnnnnnnnnnnnnnnnnnnnnnnnnnnnnnnnnnnnnnnnnnnnnnnnnnnnnnnnnnnnnnnnnnnnnnnnnnnnnnnnnnnnnnnnnnnnnnnnnnnnnnnnnnnnnnnnnnnnnnnnnnnnnnnnnnnnnnnnnnnnnnnnnnnnnnnnnnnnnnnnnnnnnnnnnnnnnnnnnnnnnnnnnnnnnnnnnnnnnnnnnnnnnnnnnnnnnnnnnnnnnnnnnnnnnnnnnnnnnnnnnnnnnnnnnnnnnnnnnnnnnnnnnnnnnnnnnnnnnnnnnnnnnnnnnnnnnnnnnnnnnnnnnnnnnnnnnnnnnnnnnnnnnnnnnnnnnnnnnnnnnnnnnnnnnnnnnnnnnnnnnnnnnnnnnnnnnnnnnnnnnnnnnnnnnnnnnnnnnnnnnnnnnnnnnnnnnnnnnnnnnnnnnnnnnnnnnnnnnnnnnnnnnnnnnnnnnnnnnnnnnnnnnnnnnnnnnnnnnnnnnnnnnnnnnnnnnnnnnnnnnnnnnnnnnnnnnnnnnnnnnnnnnnnnnnnnnnnnnnnnnnnnnnnnnnnnnnnnnnnnnnnnnnnnnnnnnnnnnnnnnnnnnnnnnnnnnnnnnnnnnnnnnnnnnnnnnnnnnnnnnnnnnnnnnnnnnnnnnnnnnnnnnnnnnnnnnnnnnnnnnnnnnnnnnnnnnnnnnnnnnnnnnnnnnnnnnnnnnnnnnnnnnnnnnnnnnnnnnnnnnnnnnnnnnnnnnnnnnnnnnnnnnnnnnnnnnnnnnnnnnnnnnnnnnnnnnnnnnnnnnnnnnnnnnnnnnnnnnnnnnnnnnnnnnnnnnnnnnnnnnnnnnnnnnnnnnnnnnnnnnnnnnnnnnnnnnnnnnnnnnnnnnnnnnnnnnnnnnnnnnnnnnnnnnnnnnnnnnnnnnnnnnnnnnnnnnnnnnnnnnnnnnnnnnnnnnnnnnnnnnnnnnnnnnnnnnnnnnnnnnnnnnnnnnnnnnnnnnnnnnnnnnnnnnnnnnnnnnnnnnnnnnnnnnnnnnnnnnnnnnnnnnnnnnnnnnnnnnnnnnnnnnnnnnnnnnnnnnnnnnnnnnnnnnnnnnnnnnnnnnnnnnnnnnnnnnnnnnnnnnnnnnnnnnnnnnnnnnnnnnnnnnnnnnnnnnnnnnnnnnnnnnnnnnnnnnnnnnnnnnnnnnnnnnnnnnnnnnnnnnnnnnnnnnnnnnnnnnnnnnnnnnnnnnnnnnnnnnnnnnnnnnnnnnnnnnnnnnnnnnnnnnnnnnnnnnnnnnnnnnnnnnnnnnnnnnnnnnnnnnnnnnnnnnnnnnnnnnnnnnnnnnnnnnnnnnnnnnnnnnnnnnnnnnnnnnnnnnnnnnnnnnnnnnnnnnnnnnnnnnnnnnnnnnnnnnnnnnnnnnnnnnnnnnnnnnnnnnnnnnnnnnnnnnnnnnnnnnnnnnnnnnnnnnnnnnnnnnnnnnnnnnnnnnnnnnnnnnnnnnnnnnnnnnnnnnnnnnnnnnnnnnnnnnnnnnnnnnnnnnnnnnnnnnnnnnnnnnnnnnnnnnnnnnnnnnnnnnnnnnnnnnnnnnnnnnnnnnnnnnnnnnnnnnnnnnnnnnnnnnnnnnnnnnnnnnnnnnnnnnnnnnnnnnnnnnnnnnnnnnnnnnnnnnnnnnnnnnnnnnnnnnnnnnnnnnnnnnnnnnnnnnnnnnnnnnnnnnnnnnnnnnnnnnnnnnnnnnnnnnnnnnnnnnnnnnnnnnnnnnnnnnnnnnnnnnnnnnnnnnnnnnnnnnnnnnnnnnnnnnnnnnnnnnnnnnnnnnnnnnnnnnnnnnnnnnnnnnnnnnnnnnnnnnnnnnnnnnnnnnnnnnnnnnnnnnnnnnnnnnnnnnnnnnnnnnnnnnnnnnnnnnnnnnnnnnnnnnnnnnnnnnnnnnnnnnnnnnnnnnnnnnnnnnnnnnnnnnnnnnnnnnnnnnnnnnnnnnnnnnnnnnnnnnnnnnnnnnnnnnnnnnnnnnnnnnnnnnnnnnnnnnnnnnnnnnnnnnnnnnnnnnnnnnnnnnnnnnnnnnnnnnnnnnnnnnnnnnnnnnnnnnnnnnnnnnnnnnnnnnnnnnnnnnnnnnnnnnnnnnnnnnnnnnnnnnnnnnnnnnnnnnnnnnnnnnnnnnnnnnnnnnnnnnnnnnnnnnnnnnnnnnnnnnnnnnnnnnnnnnnnnnnnnnnnnnnnnnnnnnnnnnnnnnnnnnnnnnnnnnnnnnnnnnnnnnnnnnnnnnnnnnnnnnnnnnnnnnnnnnnnnnnnnnnnnnnnnnnnnnnnnnnnnnnnnnnnnnnnnnnnnnnnnnnnnnnnnnnnnnnnnnnnnnnnnnnnnnnnnnnnnnnnnnnnnnnnnnnnnnnnnnnnnnnnnnnnnnnnnnnnnnnnnnnnnnnnnnnnnnnnnnnnnnnnnnnnnnnnnnnnnnnnnnnnnnnnnnnnnnnnnnnnnnnnnnnnnnnnnnnnnnnnnnnnnnnnnnnnnnnnnnnnnnnnnnnnnnnnnnnnnnnnnnnnnnnnnnnnnnnnnnnnnnnnnnnnnnnnnnnnnnnnnnnnnnnnnnnnnnnnnnnnnnnnnnnnnnnnnnnnnnnnnnnnnnnnnnnnnnnnnnnnnnnnnnnnnnnnnnnnnnnnnnnnnnnnnnnnnnnnnnnnnnnnnnnnnnnnnnnnnnnnnnnnnnnnnnnnnnnnnnnnnnnnnnnnnnnnnnnnnnnnnnnnnnnnnnnnnnnnnnnnnnnnnnnnnnnnnnnnnnnnnnnnnnnnnnnnnnnnnnnnnnnnnnnnnnnnnnnnnnnnnnnnnnnnnnnnnnnnnnnnnnnnnnnnnnnnnnnnnnnnnnnnnnnnnnnnnnnnnnnnnnnnnnnnnnnnnnnnnnnnnnnnnnnnnnnnnnnnnnnnnnnnnnnnnnnnnnnnnnnnnnnnnnnnnnnnnnnnnnnnnnnnnnnnnnnnnnnnnnnnnnnnnnnnnnnnnnnnnnnnnnnnnnnnnnnnnnnnnnnnnnnnnnnnnnnnnnnnnnnnnnnnnnnnnnnnnnnnnnnnnnnnnnnnnnnnnnnnnnnnnnnnnnnnnnnnnnnnnnnnnnnnnnnnnnnnnnnnnnnnnnnnnnnnnnnnnnnnnnnnnnnnnnnnnnnnnnnnnnnnnnnnnnnnnnnnnnnnnnnnnnnnnnnnnnnnnnnnnnnnnnnnnnnnnnnnnnnnnnnnnnnnnnnnnnnnnnnnnnnnnnnnnnnnnnnnnnnnnnnnnnnnnnnnnnnnnnnnnnnnnnnnnnnnnnnnnnnnnnnnnnnnnnnnnnnnnnnnnnnnnnnnnnnnnnnnnnnnnnnnnnnnnnnnnnnnnnnnnnnnnnnnnnnnnnnnnnnnnnnnnnnnnnnnnnnnnnnnnnnnnnnnnnnnnnnnnnnnnnnnnnnnnnnnnnnnnnnnnnnnnnnnnnnnnnnnnnnnnnnnnnnnnnnnnnnnnnnnnnnnnnnnnnnnnnnnnnnnnnnnnnnnnnnnnnnnnnnnnnnnnnnnnnnnnnnnnnnnnnnnnnnnnnnnnnnnnnnnnnnnnnnnnnnnnnnnnnnnnnnnnnnnnnnnnnnnnnnnnnnnnnnnnnnnnnnnnnnnnnnnnnnnnnnnnnnnnnnnnnnnnnnnnnnnnnnnnnnnnnnnnnnnnnnnnnnnnnnnnnnnnnnnnnnnnnnnnnnnnnnnnnnnnnnnnnnnnnnnnnnnnnnnnnnnnnnnnnnnnnnnnnnnnnnnnnnnnnnnnnnnnnnnnnnnnnnnnnnnnnnnnnnnnnnnnnnnnnnnnnnnnnnnnnnnnnnnnnnnnnnnnnnnnnnnnnnnnnnnnnnnnnnnnnnnnnnnnnnnnnnnnnnnnnnnnnnnnnnnnnnnnnnnnnnnnnnnnnnnnnnnnnnnnnnnnnnnnnnnnnnnnnnnnnnnnnnnnnnnnnnnnnnnnnnnnnnnnnnnnnnnnnnnnnnnnnnnnnnnnnnnnnnnnnnnnnnnnnnnnnnnnnnnnnnnnnnnnnnnnnnnnnnnnnnnnnnnnnnnnnnnnnnnnnnnnnnnnnnnnnnnnnnnnnnnnnnnnnnnnnnnnnnnnnnnnnnnnnnnnnnnnnnnnnnnnnnnnnnnnnnnnnnnnnnnnnnnnnnnnnnnnnnnnnnnnnnnnnnnnnnnnnnnnnnnnnnnnnnnnnnnnnnnnnnnnnnnnnnnnnnnnnnnnnnnnnnnnnnnnnnnnnnnnnnnnnnnnnnnnnnnnnnnnnnnnnnnnnnnnnnnnnnnnnnnnnnnnnnnnnnnnnnnnnnnnnnnnnnnnnnnnnnnnnnnnnnnnnnnnnnnnnnnnnnnnnnnnnnnnnnnnnnnnnnnnnnnnnnnnnnnnnnnnnnnnnnnnnnnnnnnnnnnnnnnnnnnnnnnnnnnnnnnnnnnnnnnnnnnnnnnnnnnnnnnnnnnnnnnnnnnnnnnnnnnnnnnnnnnnnnnnnnnnnnnnnnnnnnnnnnnnnnnnnnnnnnnnnnnnnnnnnnnnnnnnnnnnnnnnnnnnnnnnnnnnnnnnnnnnnnnnnnnnnnnnnnnnnnnnnnnnnnnnnnnnnnnnnnnnnnnnnnnnnnnnnnnnnnnnnnnnnnnnnnnnnnnnnnnnnnnnnnnnnnnnnnnnnnnnnnnnnnnnnnnnnnnnnnnnnnnnnnnnnnnnnnnnnnnnnnnnnnnnnnnnnnnnnnnnnnnnnnnnnnnnnnnnnnnnnnnnnnnnnnnnnnnnnnnnnnnnnnnnnnnnnnnnnnnnnnnnnnnnnnnnnnnnnnnnnnnnnnnnnnnnnnnnnnnnnnnnnnnnnnnnnnnnnnnnnnnnnnnnnnnnnnnnnnnnnnnnnnnnnnnnnnnnnnnnnnnnnnnnnnnnnnnnnnnnnnnnnnnnnnnnnnnnnnnnnnnnnnnnnnnnnnnnnnnnnnnnnnnnnnnnnnnnnnnnnnnnnnnnnnnnnnnnnnnnnnnnnnnnnnnnnnnnnnnnnnnnnnnnnnnnnnnnnnnnnnnnnnnnnnnnnnnnnnnnnnnnnnnnnnnnnnnnnnnnnnnnnnnnnnnnnnnnnnnnnnnnnnnnnnnnnnnnnnnnnnnnnnnnnnnnnnnnnnnnnnnnnnnnnnnnnnnnnnnnnnnnnnnnnnnnnnnnnnnnnnnnnnnnnnnnnnnnnnnnnnnnnnnnnnnnnnnnnnnnnnnnnnnnnnnnnnnnnnnnnnnnnnnnnnnnnnnnnnnnnnnnnnnnnnnnnnnnnnnnnnnnnnnnnnnnnnnnnnnnnnnnnnnnnnnnnnnnnnnnnnnnnnnnnnnnnnnnnnnnnnnnnnnnnnnnnnnnnnnnnnnnnnnnnnnnnnnnnnnnnnnnnnnnnnnnnnnnnnnnnnnnnnnnnnnnnnnnnnnnnnnnnnnnnnnnnnnnnnnnnnnnnnnnnnnnnnnnnnnnnnnnnnnnnnnnnnnnnnnnnnnnnnnnnnnnnnnnnnnnnnnnnnnnnnnnnnnnnnnnnnnnnnnnnnnnnnnnnnnnnnnnnnnnnnnnnnnnnnnnnnnnnnnnnnnnnnnnnnnnnnnnnnnnnnnnnnnnnnnnnnnnnnnnnnnnnnnnnnnnnnnnnnnnnnnnnnnnnnnnnnnnnnnnnnnnnnnnnnnnnnnnnnnnnnnnnnnnnnnnnnnnnnnnnnnnnnnnnnnnnnnnnnnnnnnnnnnnnnnnnnnnnnnnnnnnnnnnnnnnnnnnnnnnnnnnnnnnnnnnnnnnnnnnnnnnnnnnnnnnnnnnnnnnnnnnnnnnnnnnnnnnnnnnnnnnnnnnnnnnnnnnnnnnnnnnnnnnnnnnnnnnnnnnnnnnnnnnnnnnnnnnnnnnnnnnnnnnnnnnnnnnnnnnnnnnnnnnnnnnnnnnnnnnnnnnnnnnnnnnnnnnnnnnnnnnnnnnnnnnnnnnnnnnnnnnnnnnnnnnnnnnnnnnnnnnnnnnnnnnnnnnnnnnnnnnnnnnnnnnnnnnnnnnnnnnnnnnnnnnnnnnnnnnnnnnnnnnnnnnnnnnnnnnnnnnnnnnnnnnnnnnnnnnnnnnnnnnnnnnnnnnnnnnnnnnnnnnnnnnnnnnnnnnnnnnnnnnnnnnnnnnnnnnnnnnnnnnnnnnnnnnnnnnnnnnnnnnnnnnnnnnnnnnnnnnnnnnnnnnnnnnnnnnnnnnnnnnnnnnnnnnnnnnnnnnnnnnnnnnnnnnnnnnnnnnnnnnnnnnnnnnnnnnnnnnnnnnnnnnnnnnnnnnnnnnnnnnnnnnnnnnnnnnnnnnnnnnnnnnnnnnnnnnnnnnnnnnnnnnnnnnnnnnnnnnnnnnnnnnnnnnnnnnnnnnnnnnnnnnnnnnnnnnnnnnnnnnnnnnnnnnnnnnnnnnnnnnnnnnnnnnnnnnnnnnnnnnnnnnnnnnnnnnnnnnnnnnnnnnnnnnnnnnnnnnnnnnnnnnnnnnnnnnnnnnnnnnnnnnnnnnnnnnnnnnnnnnnnnnnnnnnnnnnnnnnnnnnnnnnnnnnnnnnnnnnnnnnnnnnnnnnnnnnnnnnnnnnnnnnnnnnnnnnnnnnnnnnnnnnnnnnnnnnnnnnnnnnnnnnnnnnnnnnnnnnnnnnnnnnnnnnnnnnnnnnnnnnnnnnnnnnnnnnnnnnnnnnnnnnnnnnnnnnnnnnnnnnnnnnnnnnnnnnnnnnnnnnnnnnnnnnnnnnnnnnnnnnnnnnnnnnnnnnnnnnnnnnnnnnnnnnnnnnnnnnnnnnnnnnnnnnnnnnnnnnnnnnnnnnnnnnnnnnnnnnnnnnnnnnnnnnnnnnnnnnnnnnnnnnnnnnnnnnnnnnnnnnnnnnnnnnnnnnnnnnnnnnnnnnnnnnnnnnnnnnnnnnnnnnnnnnnnnnnnnnnnnnnnnnnnnnnnnnnnnnnnnnnnnnnnnnnnnnnnnnnnnnnnnnnnnnnnnnnnnnnnnnnnnnnnnnnnnnnnnnnnnnnnnnnnnnnnnnnnnnnnnnnnnnnnnnnnnnnnnnnnnnnnnnnnnnnnnnnnnnnnnnnnnnnnnnnnnnnnnnnnnnnnnnnnnnnnnnnnnnnnnnnnnnnnnnnnnnnnnnnnnnnnnnnnnnnnnnnnnnnnnnnnnnnnnnnnnnnnnnnnnnnnnnnnnnnnnnnnnnnnnnnnnnnnnnnnnnnnnnnnnnnnnnnnnnnnnnnnnnnnnnnnnnnnnnnnnnnnnnnnnnnnnnnnnnnnnnnnnnnnnnnnnnnnnnnnnnnnnnnnnnnnnnnnnnnnnnnnnnnnnnnnnnnnnnnnnnnnnnnnnnnnnnnnnnnnnnnnnnnnnnnnnnnnnnnnnnnnnnnnnnnnnnnnnnnnnnnnnnnnnnnnnnnnnnnnnnnnnnnnnnnnnnnnnnnnnnnnnnnnnnnnnnnnnnnnnnnnnnnnnnnnnnnnnnnnnnnnnnnnnnnnnnnnnnnnnnnnnnnnnnnnnnnnnnnnnnnnnnnnnnnnnnnnnnnnnnnnnnnnnnnnnnnnnnnnnnnnnnnnnnnnnnnnnnnnnnnnnnnnnnnnnnnnnnnnnnnnnnnnnnnnnnnnnnnnnnnnnnnnnnnnnnnnnnnnnnnnnnnnnnnnnnnnnnnnnnnnnnnnnnnnnnnnnnnnnnnnnnnnnnnnnnnnnnnnnnnnnnnnnnnnnnnnnnnnnnnnnnnnnnnnnnnnnnnnnnnnnnnnnnnnnnnnnnnnnnnnnnnnnnnnnnnnnnnnnnnnnnnnnnnnnnnnnnnnnnnnnnnnnnnnnnnnnnnnnnnnnnnnnnnnnnnnnnnnnnnnnnnnnnnnnnnnnnnnnnnnnnnnnnnnnnnnnnnnnnnnnnnnnnnnnnnnnnnnnnnnnnnnnnnnnnnnnnnnnnnnnnnnnnnnnnnnnnnnnnnnnnnnnnnnnnnnnnnnnnnnnnnnnnnnnnnnnnnnnnnnnnnnnnnnnnnnnnnnnnnnnnnnnnnnnnnnnnnnnnnnnnnnnnnnnnnnnnnnnnnnnnnnnnnnnnnnnnnnnnnnnnnnnnnnnnnnnnnnnnnnnnnnnnnnnnnnnnnnnnnnnnnnnnnnnnnnnnnnnnnnnnnnnnnnnnnnnnnnnnnnnnnnnnnnnnnnnnnnnnnnnnnnnnnnnnnnnnnnnnnnnnnnnnnnnnnnnnnnnnnnnnnnnnnnnnnnnnnnnnnnnnnnnnnnnnnnnnnnnnnnnnnnnnnnnnnnnnnnnnnnnnnnnnnnnnnnnnnnnnnnnnnnnnnnnnnnnnnnnnnnnnnnnnnnnnnnnnnnnnnnnnnnnnnnnnnnnnnnnnnnnnnnnnnnnnnnnnnnnnnnnnnnnnnnnnnnnnnnnnnnnnnnnnnnnnnnnnnnnnnnnnnnnnnnnnnnnnnnnnnnnnnnnnnnnnnnnnnnnnnnnnnnnnnnnnnnnnnnnnnnnnnnnnnnnnnnnnnnnnnnnnnnnnnnnnnnnnnnnnnnnnnnnnnnnnnnnnnnnnnnnnnnnnnnnnnnnnnnnnnnnnnnnnnnnnnnnnnnnnnnnnnnnnnnnnnnnnnnnnnnnnnnnnnnnnnnnnnnnnnnnnnnnnnnnnnnnnnnnnnnnnnnnnnnnnnnnnnnnnnnnnnnnnnnnnnnnnnnnnnnnnnnnnnnnnnnnnnnnnnnnnnnnnnnnnnnnnnnnnnnnnnnnnnnnnnnnnnnnnnnnnnnnnnnnnnnnnnnnnnnnnnnnnnnnnnnnnnnnnnnnnnnnnnnnnnnnnnnnnnnnnnnnnnnnnnnnnnnnnnnnnnnnnnnnnnnnnnnnnnnnnnnnnnnnnnnnnnnnnnnnnnnnnnnnnnnnnnnnnnnnnnnnnnnnnnnnnnnnnnnnnnnnnnnnnnnnnnnnnnnnnnnnnnnnnnnnnnnnnnnnnnnnnnnnnnnnnnnnnnnnnnnnnnnnnnnnnnnnnnnnnnnnnnnnnnnnnnnnnnnnnnnnnnnnnnnnnnnnnnnnnnnnnnnnnnnnnnnnnnnnnnnnnnnnnnnnnnnnnnnnnnnnnnnnnnnnnnnnnnnnnnnnnnnnnnnnnnnnnnnnnnnnnnnnnnnnnnnnnnnnnnnnnnnnnnnnnnnnnnnnnnnnnnnnnnnnnnnnnnnnnnnnnnnnnnnnnnnnnnnnnnnnnnnnnnnnnnnnnnnnnnnnnnnnnnnnnnnnnnnnnnnnnnnnnnnnnnnnnnnnnnnnnnnnnnnnnnnnnnnnnnnnnnnnnnnnnnnnnnnnnnnnnnnnnnnnnnnnnnnnnnnnnnnnnnnnnnnnnnnnnnnnnnnnnnnnnnnnnnnnnnnnnnnnnnnnnnnnnnnnnnnnnnnnnnnnnnnnnnnnnnnnnnnnnnnnnnnnnnnnnnnnnnnnnnnnnnnnnnnnnnnnnnnnnnnnnnnnnnnnnnnnnnnnnnnnnnnnnnnnnnnnnnnnnnnnnnnnnnnnnnnnnnnnnnnnnnnnnnnnnnnnnnnnnnnnnnnnnnnnnnnnnnnnnnnnnnnnnnnnnnnnnnnnnnnnnnnnnnnnnnnnnnnnnnnnnnnnnnnnnnnnnnnnnnnnnnnnnnnnnnnnnnnnnnnnnnnnnnnnnnnnnnnnnnnnnnnnnnnnnnnnnnnnnnnnnnnnnnnnnnnnnnnnnnnnnnnnnnnnnnnnnnnnnnnnnnnnnnnnnnnnnnnnnnnnnnnnnnnnnnnnnnnnnnnnnnnnnnnnnnnnnnnnnnnnnnnnnnnnnnnnnnnnnnnnnnnnnnnnnnnnnnnnnnnnnnnnnnnnnnnnnnnnnnnnnnnnnnnnnnnnnnnnnnnnnnnnnnnnnnnnnnnnnnnnnnnnnnnnnnnnnnnnnnnnnnnnnnnnnnnnnnnnnnnnnnnnnnnnnnnnnnnnnnnnnnnnnnnnnnnnnnnnnnnnnnnnnnnnnnnnnnnnnnnnnnnnnnnnnnnnnnnnnnnnnnnnnnnnnnnnnnnnnnnnnnnnnnnnnnnnnnnnnnnnnnnnnnnnnnnnnnnnnnnnnnnnnnnnnnnnnnnnnnnnnnnnnnnnnnnnnnnnnnnnnnnnnnnnnnnnnnnnnnnnnnnnnnnnnnnnnnnnnnnnnnnnnnnnnnnnnnnnnnnnnnnnnnnnnnnnnnnnnnnnnnnnnnnnnnnnnnnnnnnnnnnnnnnnnnnnnnnnnnnnnnnnnnnnnnnnnnnnnnnnnnnnnnnnnnnnnnnnnnnnnnnnnnnnnnnnnnnnnnnnnnnnnnnnnnnnnnnnnnnnnnnnnnnnnnnnnnnnnnnnnnnnnnnnnnnnnnnnnnnnnnnnnnnnnnnnnnnnnnnnnnnnnnnnnnnnnnnnnnnnnnnnnnnnnnnnnnnnnnnnnnnnnnnnnnnnnnnnnnnnnnnnnnnnnnnnnnnnnnnnnnnnnnnnnnnnnnnnnnnnnnnnnnnnnnnnnnnnnnnnnnnnnnnnnnnnnnnnnnnnnnnnnnnnnnnnnnnnnnnnnnnnnnnnnnnnnnnnnnnnnnnnnnnnnnnnnnnnnnnnnnnnnnnnnnnnnnnnnnnnnnnnnnnnnnnnnnnnnnnnnnnnnnnnnnnnnnnnnnnnnnnnnnnnnnnnnnnnnnnnnnnnnnnnnnnnnnnnnnnnnnnnnnnnnnnnnnnnnnnnnnnnnnnnnnnnnnnnnnnnnnnnnnnnnnnnnnnnnnnnnnnnnnnnnnnnnnnnnnnnnnnnnnnnnnnnnnnnnnnnnnnnnnnnnnnnnnnnnnnnnnnnnnnnnnnnnnnnnnnnnnnnnnnnnnnnnnnnnnnnnnnnnnnnnnnnnnnnnnnnnnnnnnnnnnnnnnnnnnnnnnnnnnnnnnnnnnnnnnnnnnnnnnnnnnnnnnnnnnnnnnnnnnnnnnnnnnnnnnnnnnnnnnnnnnnnnnnnnnnnnnnnnnnnnnnnnnnnnnnnnnnnnnnnnnnnnnnnnnnnnnnnnnnnnnnnnnnnnnnnnnnnnnnnnnnnnnnnnnnnnnnnnnnnnnnnnnnnnnnnnnnnnnnnnnnnnnnnnnnnnnnnnnnnnnnnnnnnnnnnnnnnnnnnnnnnnnnnnnnnnnnnnnnnnnnnnnnnnnnnnnnnnnnnnnnnnnnnnnnnnnnnnnnnnnnnnnnnnnnnnnnnnnnnnnnnnnnnnnnnnnnnnnnnnnnnnnnnnnnnnnnnnnnnnnnnnnnnnnnnnnnnnnnnnnnnnnnnnnnnnnnnnnnnnnnnnnnnnnnnnnnnnnnnnnnnnnnnnnnnnnnnnnnnnnnnnnnnnnnnnnnnnnnnnnnnnnnnnnnnnnnnnnnnnnnnnnnnnnnnnnnnnnnnnnnnnnnnnnnnnnnnnnnnnnnnnnnnnnnnnnnnnnnnnnnnnnnnnnnnnnnnnnnnnnnnnnnnnnnnnnnnnnnnnnnnnnnnnnnnnnnnnnnnnnnnnnnnnnnnnnnnnnnnnnnnnnnnnnnnnnnnnnnnnnnnnnnnnnnnnnnnnnnnnnnnnnnnnnnnnnnnnnnnnnnnnnnnnnnnnnnnnnnnnnnnnnnnnnnnnnnnnnnnnnnnnnnnnnnnnnnnnnnnnnnnnnnnnnnnnnnnnnnnnnnnnnnnnnnnnnnnnnnnnnnnnnnnnnnnnnnnnnnnnnnnnnnnnnnnnnnnnnnnnnnnnnnnnnnnnnnnnnnnnnnnnnnnnnnnnnnnnnnnnnnnnnnnnnnnnnnnnnnnnnnnnnnnnnnnnnnnnnnnnnnnnnnnnnnnnnnnnnnnnnnnnnnnnnnnnnnnnnnnnnnnnnnnnnnnnnnnnnnnnnnnnnnnnnnnnnnnnnnnnnnnnnnnnnnnnnnnnnnnnnnnnnnnnnnnnnnnnnnnnnnnnnnnnnnnnnnnnnnnnnnnnnnnnnnnnnnnnnnnnnnnnnnnnnnnnnnnnnnnnnnnnnnnnnnnnnnnnnnnnnnnnnnnnnnnnnnnnnnnnnnnnnnnnnnnnnnnnnnnnnnnnnnnnnnnnnnnnnnnnnnnnnnnnnnnnnnnnnnnnnnnnnnnnnnnnnnnnnnnnnnnnnnnnnnnnnnnnnnnnnnnnnnnnnnnnnnnnnnnnnnnnnnnnnnnnnnnnnnnnnnnnnnnnnnnnnnnnnnnnnnnnnnnnnnnnnnnnnnnnnnnnnnnnnnnnnnnnnnnnnnnnnnnnnnnnnnnnnnnnnnnnnnnnnnnnnnnnnnnnnnnnnnnnnnnnnnnnnnnnnnnnnnnnnnnnnnnnnnnnnnnnnnnnnnnnnnnnnnnnnnnnnnnnnnnnnnnnnnnnnnnnnnnnnnnnnnnnnnnnnnnnnnnnnnnnnnnnnnnnnnnnnnnnnnnnnnnnnnnnnnnnnnnnnnnnnnnnnnnnnnnnnnnnnnnnnnnnnnnnnnnnnnnnnnnnnnnnnnnnnnnnnnnnnnnnnnnnnnnnnnnnnnnnnnnnnnnnnnnnnnnnnnnnnnnnnnnnnnnnnnnnnnnnnnnnnnnnnnnnnnnnnnnnnnnnnnnnnnnnnnnnnnnnnnnnnnnnnnnnnnnnnnnnnnnnnnnnnnnnnnnnnnnnnnnnnnnnnnnnnnnnnnnnnnnnnnnnnnnnnnnnnnnnnnnnnnnnnnnnnnnnnnnnnnnnnnnnnnnnnnnnnnnnnnnnnnnnnnnnnnnnnnnnnnnnnnnnnnnnnnnnnnnnnnnnnnnnnnnnnnnnnnnnnnnnnnnnnnnnnnnnnnnnnnnnnnnnnnnnnnnnnnnnnnnnnnnnnnnnnnnnnnnnnnnnnnnnnnnnnnnnnnnnnnnnnnnnnnnnnnnnnnnnnnnnnnnnnnnnnnnnnnnnnnnnnnnnnnnnnnnnnnnnnnnnnnnnnnnnnnnnnnnnnnnnnnnnnnnnnnnnnnnnnnnnnnnnnnnnnnnnnnnnnnnnnnnnnnnnnnnnnnnnnnnnnnnnnnnnnnnnnnnnnnnnnnnnnnnnnnnnnnnnnnnnnnnnnnnnnnnnnnnnnnnnnnnnnnnnnnnnnnnnnnnnnnnnnnnnnnnnnnnnnnnnnnnnnnnnnnnnnnnnnnnnnnnnnnnnnnnnnnnnnnnnnnnnnnnnnnnnnnnnnnnnnnnnnnnnnnnnnnnnnnnnnnnnnnnnnnnnnnnnnnnnnnnnnnnnnnnnnnnnnnnnnnnnnnnnnnnnnnnnnnnnnnnnnnnnnnnnnnnnnnnnnnnnnnnnnnnnnnnnnnnnnnnnnnnnnnnnnnnnnnnnnnnnnnnnnnnnnnnnnnnnnnnnnnnnnnnnnnnnnnnnnnnnnnnnnnnnnnnnnnnnnnnnnnnnnnnnnnnnnnnnnnnnnnnnnnnnnnnnnnnnnnnnnnnnnnnnnnnnnnnnnnnnnnnnnnnnnnnnnnnnnnnnnnnnnnnnnnnnnnnnnnnnnnnnnnnnnnnnnnnnnnnnnnnnnnnnnnnnnnnnnnnnnnnnnnnnnnnnnnnnnnnnnnnnnnnnnnnnnnnnnnnnnnnnnnnnnnnnnnnnnnnnnnnnnnnnnnnnnnnnnnnnnnnnnnnnnnnnnnnnnnnnnnnnnnnnnnnnnnnnnnnnnnnnnnnnnnnnnnnnnnnnnnnnnnnnnnnnnnnnnnnnnnnnnnnnnnnnnnnnnnnnnnnnnnnnnnnnnnnnnnnnnnnnnnnnnnnnnnnnnnnnnnnnnnnnnnnnnnnnnnnnnnnnnnnnnnnnnnnnnnnnnnnnnnnnnnnnnnnnnnnnnnnnnnnnnnnnnnnnnnnnnnnnnnnnnnnnnnnnnnnnnnnnnnnnnnnnnnnnnnnnnnnnnnnnnnnnnnnnnnnnnnnnnnnnnnnnnnnnnnnnnnnnnnnnnnnnnnnnnnnnnnnnnnnnnnnnnnnnnnnnnnnnnnnnnnnnnnnnnnnnnnnnnnnnnnnnnnnnnnnnnnnnnnnnnnnnnnnnnnnnnnnnnnnnnnnnnnnnnnnnnnnnnnnnnnnnnnnnnnnnnnnnnnnnnnnnnnnnnnnnnnnnnnnnnnnnnnnnnnnnnnnnnnnnnnnnnnnnnnnnnnnnnnnnnnnnnnnnnnnnnnnnnnnnnnnnnnnnnnnnnnnnnnnnnnnnnnnnnnnnnnnnnnnnnnnnnnnnnnnnnnnnnnnnnnnnnnnnnnnnnnnnnnnnnnnnnnnnnnnnnnnnnnnnnnnnnnnnnnnnnnnnnnnnnnnnnnnnnnnnnnnnnnnnnnnnnnnnnnnnnnnnnnnnnnnnnnnnnnnnnnnnnnnnnnnnnnnnnnnnnnnnnnnnnnnnnnnnnnnnnnnnnnnnnnnnnnnnnnnnnnnnnnnnnnnnnnnnnnnnnnnnnnnnnnnnnnnnnnnnnnnnnnnnnnnnnnnnnnnnnnnnnnnnnnnnnnnnnnnnnnnnnnnnnnnnnnnnnnnnnnnnnnnnnnnnnnnnnnnnnnnnnnnnnnnnnnnnnnnnnnnnnnnnnnnnnnnnnnnnnnnnnnnnnnnnnnnnnnnnnnnnnnnnnnnnnnnnnnnnnnnnnnnnnnnnnnnnnnnnnnnnnnnnnnnnnnnnnnnnnnnnnnnnnnnnnnnnnnnnnnnnnnnnnnnnnnnnnnnnnnnnnnnnnnnnnnnnnnnnnnnnnnnnnnnnnnnnnnnnnnnnnnnnnnnnnnnnnnnnnnnnnnnnnnnnnnnnnnnnnnnnnnnnnnnnnnnnnnnnnnnnnnnnnnnnnnnnnnnnnnnnnnnnnnnnnnnnnnnnnnnnnnnnnnnnnnnnnnnnnnnnnnnnnnnnnnnnnnnnnnnnnnnnnnnnnnnnnnnnnnnnnnnnnnnnnnnnnnnnnnnnnnnnnnnnnnnnnnnnnnnnnnnnnnnnnnnnnnnnnnnnnnnnnnnnnnnnnnnnnnnnnnnnnnnnnnnnnnnnnnnnnnnnnnnnnnnnnnnnnnnnnnnnnnnnnnnnnnnnnnnnnnnnnnnnnnnnnnnnnnnnnnnnnnnnnnnnnnnnnnnnnnnnnnnnnnnnnnnnnnnnnnnnnnnnnnnnnnnnnnnnnnnnnnnnnnnnnnnnnnnnnnnnnnnnnnnnnnnnnnnnnnnnnnnnnnnnnnnnnnnnnnnnnnnnnnnnnnnnnnnnnnnnnnnnnnnnnnnnnnnnnnnnnnnnnnnnnnnnnnnnnnnnnnnnnnnnnnnnnnnnnnnnnnnnnnnnnnnnnnnnnnnnnnnnnnnnnnnnnnnnnnnnnnnnnnnnnnnnnnnnnnnnnnnnnnnnnnnnnnnnnnnnnnnnnnnnnnnnnnnnnnnnnnnnnnnnnnnnnnnnnnnnnnnnnnnnnnnnnnnnnnnnnnnnnnnnnnnnnnnnnnnnnnnnnnnnnnnnnnnnnnnnnnnnnnnnnnnnnnnnnnnnnnnnnnnnnnnnnnnnnnnnnnnnnnnnnnnnnnnnnnnnnnnnnnnnnnnnnnnnnnnnnnnnnnnnnnnnnnnnnnnnnnnnnnnnnnnnnnnnnnnnnnnnnnnnnnnnnnnnnnnnnnnnnnnnnnnnnnnnnnnnnnnnnnnnnnnnnnnnnnnnnnnnnnnnnnnnnnnnnnnnnnnnnnnnnnnnnnnnnnnnnnnnnnnnnnnnnnnnnnnnnnnnnnnnnnnnnnnnnnnnnnnnnnnnnnnnnnnnnnnnnnnnnnnnnnnnnnnnnnnnnnnnnnnnnnnnnnnnnnnnnnnnnnnnnnnnnnnnnnnnnnnnnnnnnnnnnnnnnnnnnnnnnnnnnnnnnnnnnnnnnnnnnnnnnnnnnnnnnnnnnnnnnnnnnnnnnnnnnnnnnnnnnnnnnnnnnnnnnnnnnnnnnnnnnnnnnnnnnnnnnnnnnnnnnnnnnnnnnnnnnnnnnnnnnnnnnnnnnnnnnnnnnnnnnnnnnnnnnnnnnnnnnnnnnnnnnnnnnnnnnnnnnnnnnnnnnnnnnnnnnnnnnnnnnnnnnnnnnnnnnnnnnnnnnnnnnnnnnnnnnnnnnnnnnnnnnnnnnnnnnnnnnnnnnnnnnnnnnnnnnnnnnnnnnnnnnnnnnnnnnnnnnnnnnnnnnnnnnnnnnnnnnnnnnnnnnnnnnnnnnnnnnnnnnnnnnnnnnnnnnnnnnnnnnnnnnnnnnnnnnnnnnnnnnnnnnnnnnnnnnnnnnnnnnnnnnnnnnnnnnnnnnnnnnnnnnnnnnnnnnnnnnnnnnnnnnnnnnnnnnnnnnnnnnnnnnnnnnnnnnnnnnnnnnnnnnnnnnnnnnnnnnnnnnnnnnnnnnnnnnnnnnnnnnnnnnnnnnnnnnnnnnnnnnnnnnnnnnnnnnnnnnnnnnnnnnnnnnnnnnnnnnnnnnnnnnnnnnnnnnnnnnnnnnnnnnnnnnnnnnnnnnnnnnnnnnnnnnnnnnnnnnnnnnnnnnnnnnnnnnnnnnnnnnnnnnnnnnnnnnnnnnnnnnnnnnnnnnnnnnnnnnnnnnnnnnnnnnnnnnnnnnnnnnnnnnnnnnnnnnnnnnnnnnnnnnnnnnnnnnnnnnnnnnnnnnnnnnnnnnnnnnnnnnnnnnnnnnnnnnnnnnnnnnnnnnnnnnnnnnnnnnnnnnnnnnnnnnnnnnnnnnnnnnnnnnnnnnnnnnnnnnnnnnnnnnnnnnnnnnnnnnnnnnnnnnnnnnnnnnnnnnnnnnnnnnnnnnnnnnnnnnnnnnnnnnnnnnnnnnnnnnnnnnnnnnnnnnnnnnnnnnnnnnnnnnnnnnnnnnnnnnnnnnnnnnnnnnnnnnnnnnnnnnnnnnnnnnnnnnnnnnnnnnnnnnnnnnnnnnnnnnnnnnnnnnnnnnnnnnnnnnnnnnnnnnnnnnnnnnnnnnnnnnnnnnnnnnnnnnnnnnnnnnnnnnnnnnnnnnnnnnnnnnnnnnnnnnnnnnnnnnnnnnnnnnnnnnnnnnnnnnnnnnnnnnnnnnnnnnnnnnnnnnnnnnnnnnnnnnnnnnnnnnnnnnnnnnnnnnnnnnnnnnnnnnnnnnnnnnnnnnnnnnnnnnnnnnnnnnnnnnnnnnnnnnnnnnnnnnnnnnnnnnnnnnnnnnnnnnnnnnnnnnnnnnnnnnnnnnnnnnnnnnnnnnnnnnnnnnnnnnnnnnnnnnnnnnnnnnnnnnnnnnnnnnnnnnnnnnnnnnnnnnnnnnnnnnnnnnnnnnnnnnnnnnnnnnnnnnnnnnnnnnnnnnnnnnnnnnnnnnnnnnnnnnnnnnnnnnnnnnnnnnnnnnnnnnnnnnnnnnnnnnnnnnnnnnnnnnnnnnnnnnnnnnnnnnnnnnnnnnnnnnnnnnnnnnnnnnnnnnnnnnnnnnnnnnnnnnnnnnnnnnnnnnnnnnnnnnnnnnnnnnnnnnnnnnnnnnnnnnnnnnnnnnnnnnnnnnnnnnnnnnnnnnnnnnnnnnnnnnnnnnnnnnnnnnnnnnnnnnnnnnnnnnnnnnnnnnnnnnnnnnnnnnnnnnnnnnnnnnnnnnnnnnnnnnnnnnnnnnnnnnnnnnnnnnnnnnnnnnnnnnnnnnnnnnnnnnnnnnnnnnnnnnnnnnnnnnnnnnnnnnnnnnnnnnnnnnnnnnnnnnnnnnnnnnnnnnnnnnnnnnnnnnnnnnnnnnnnnnnnnnnnnnnnnnnnnnnnnnnnnnnnnnnnnnnnnnnnnnnnnnnnnnnnnnnnnnnnnnnnnnnnnnnnnnnnnnnnnnnnnnnnnnnnnnnnnnnnnnnnnnnnnnnnnnnnnnnnnnnnnnnnnnnnnnnnnnnnnnnnnnnnnnnnnnnnnnnnnnnnnnnnnnnnnnnnnnnnnnnnnnnnnnnnnnnnnnnnnnnnnnnnnnnnnnnnnnnnnnnnnnnnnnnnnnnnnnnnnnnnnnnnnnnnnnnnnnnnnnnnnnnnnnnnnnnnnnnnnnnnnnnnnnnnnnnnnnnnnnnnnnnnnnnnnnnnnnnnnnnnnnnnnnnnnnnnnnnnnnnnnnnnnnnnnnnnnnnnnnnnnnnnnnnnnnnnnnnnnnnnnnnnnnnnnnnnnnnnnnnnnnnnnnnnnnnnnnnnnnnnnnnnnnnnnnnnnnnnnnnnnnnnnnnnnnnnnnnnnnnnnnnnnnnnnnnnnnnnnnnnnnnnnnnnnnnnnnnnnnnnnnnnnnnnnnnnnnnnnnnnnnnnnnnnnnnnnnnnnnnnnnnnnnnnnnnnnnnnnnnnnnnnnnnnnnnnnnnnnnnnnnnnnnnnnnnnnnnnnnnnnnnnnnnnnnnnnnnnnnnnnnnnnnnnnnnnnnnnnnnnnnnnnnnnnnnnnnnnnnnnnnnnnnnnnnnnnnnnnnnnnnnnnnnnnnnnnnnnnnnnnnnnnnnnnnnnnnnnnnnnnnnnnnnnnnnnnnnnnnnnnnnnnnnnnnnnnnnnnnnnnnnnnnnnnnnnnnnnnnnnnnnnnnnnnnnnnnnnnnnnnnnnnnnnnnnnnnnnnnnnnnnnnnnnnnnnnnnnnnnnnnnnnnnnnnnnnnnnnnnnnnnnnnnnnnnnnnnnnnnnnnnnnnnnnnnnnnnnnnnnnnnnnnnnnnnnnnnnnnnnnnnnnnnnnnnnnnnnnnnnnnnnnnnnnnnnnnnnnnnnnnnnnnnnnnnnnnnnnnnnnnnnnnnnnnnnnnnnnnnnnnnnnnnnnnnnnnnnnnnnnnnnnnnnnnnnnnnnnnnnnnnnnnnnnnnnnnnnnnnnnnnnnnnnnnnnnnnnnnnnnnnnnnnnnnnnnnnnnnnnnnnnnnnnnnnnnnnnnnnnnnnnnnnnnnnnnnnnnnnnnnnnnnnnnnnnnnnnnnnnnnnnnnnnnnnnnnnnnnnnnnnnnnnnnnnnnnnnnnnnnnnnnnnnnnnnnnnnnnnnnnnnnnnnnnnnnnnnnnnnnnnnnnnnnnnnnnnnnnnnnnnnnnnnnnnnnnnnnnnnnnnnnnnnnnnnnnnnnnnnnnnnnnnnnnnnnnnnnnnnnnnnnnnnnnnnnnnnnnnnnnnnnnnnnnnnnnnnnnnnnnnnnnnnnnnnnnnnnnnnnnnnnnnnnnnnnnnnnnnnnnnnnnnnnnnnnnnnnnnnnnnnnnnnnnnnnnnnnnnnnnnnnnnnnnnnnnnnnnnnnnnnnnnnnnnnnnnnnnnnnnnnnnnnnnnnnnnnnnnnnnnnnnnnnnnnnnnnnnnnnnnnnnnnnnnnnnnnnnnnnnnnnnnnnnnnnnnnnnnnnnnnnnnnnnnnnnnnnnnnnnnnnnnnnnnnnnnnnnnnnnnnnnnnnnnnnnnnnnnnnnnnnnnnnnnnnnnnnnnnnnnnnnnnnnnnnnnnnnnnnnnnnnnnnnnnnnnnnnnnnnnnnnnnnnnnnnnnnnnnnnnnnnnnnnnnnnnnnnnnnnnnnnnnnnnnnnnnnnnnnnnnnnnnnnnnnnnnnnnnnnnnnnnnnnnnnnnnnnnnnnnnnnnnnnnnnnnnnnnnnnnnnnnnnnnnnnnnnnnnnnnnnnnnnnnnnnnnnnnnnnnnnnnnnnnnnnnnnnnnnnnnnnnnnnnnnnnnnnnnnnnnnnnnnnnnnnnnnnnnnnnnnnnnnnnnnnnnnnnnnnnnnnnnnnnnnnnnnnnnnnnnnnnnnnnnnnnnnnnnnnnnnnnnnnnnnnnnnnnnnnnnnnnnnnnnnnnnnnnnnnnnnnnnnnnnnnnnnnnnnnnnnnnnnnnnnnnnnnnnnnnnnnnnnnnnnnnnnnnnnnnnnnnnnnnnnnnnnnnnnnnnnnnnnnnnnnnnnnnnnnnnnnnnnnnnnnnnnnnnnnnnnnnnnnnnnnnnnnnnnnnnnnnnnnnnnnnnnnnnnnnnnnnnnnnnnnnnnnnnnnnnnnnnnnnnnnnnnnnnnnnnnnnnnnnnnnnnnnnnnnnnnnnnnnnnnnnnnnnnnnnnnnnnnnnnnnnnnnnnnnnnnnnnnnnnnnnnnnnnnnnnnnnnnnnnnnnnnnnnnnnnnnnnnnnnnnnnnnnnnnnnnnnnnnnnnnnnnnnnnnnnnnnnnnnnnnnnnnnnnnnnnnnnnnnnnnnnnnnnnnnnnnnnnnnnnnnnnnnnnnnnnnnnnnnnnnnnnnnnnnnnnnnnnnnnnnnnnnnnnnnnnnnnnnnnnnnnnnnnnnnnnnnnnnnnnnnnnnnnnnnnnnnnnnnnnnnnnnnnnnnnnnnnnnnnnnnnnnnnnnnnnnnnnnnnnnnnnnnnnnnnnnnnnnnnnnnnnnnnnnnnnnnnnnnnnnnnnnnnnnnnnnnnnnnnnnnnnnnnnnnnnnnnnnnnnnnnnnnnnnnnnnnnnnnnnnnnnnnnnnnnnnnnnnnnnnnnnnnnnnnnnnnnnnnnnnnnnnnnnnnnnnnnnnnnnnnnnnnnnnnnnnnnnnnnnnnnnnnnnnnnnnnnnnnnnnnnnnnnnnnnnnnnnnnnnnnnnnnnnnnnnnnnnnnnnnnnnnnnnnnnnnnnnnnnnnnnnnnnnnnnnnnnnnnnnnnnnnnnnnnnnnnnnnnnnnnnnnnnnnnnnnnnnnnnnnnnnnnnnnnnnnnnnnnnnnnnnnnnnnnnnnnnnnnnnnnnnnnnnnnnnnnnnnnnnnnnnnnnnnnnnnnnnnnnnnnnnnnnnnnnnnnnnnnnnnnnnnnnnnnnnnnnnnnnnnnnnnnnnnnnnnnnnnnnnnnnnnnnnnnnnnnnnnnnnnnnnnnnnnnnnnnnnnnnnnnnnnnnnnnnnnnnnnnnnnnnnnnnnnnnnnnnnnnnnnnnnnnnnnnnnnnnnnnnnnnnnnnnnnnnnnnnnnnnnnnnnnnnnnnnnnnnnnnnnnnnnnnnnnnnnnnnnnnnnnnnnnnnnnnnnnnnnnnnnnnnnnnnnnnnnnnnnnnnnnnnnnnnnnnnnnnnnnnnnnnnnnnnnnnnnnnnnnnnnnnnnnnnnnnnnnnnnnnnnnnnnnnnnnnnnnnnnnnnnnnnnnnnnnnnnnnnnnnnnnnnnnnnnnnnnnnnnnnnnnnnnnnnnnnnnnnnnnnnnnnnnnnnnnnnnnnnnnnnnnnnnnnnnnnnnnnnnnnnnnnnnnnnnnnnnnnnnnnnnnnnnnnnnnnnnnnnnnnnnnnnnnnnnnnnnnnnnnnnnnnnnnnnnnnnnnnnnnnnnnnnnnnnnnnnnnnnnnnnnnnnnnnnnnnnnnnnnnnnnnnnnnnnnnnnnnnnnnnnnnnnnnnnnnnnnnnnnnnnnnnnnnnnnnnnnnnnnnnnnnnnnnnnnnnnnnnnnnnnnnnnnnnnnnnnnnnnnnnnnnnnnnnnnnnnnnnnnnnnnnnnnnnnnnnnnnnnnnnnnnnnnnnnnnnnnnnnnnnnnnnnnnnnnnnnnnnnnnnnnnnnnnnnnnnnnnnnnnnnnnnnnnnnnnnnnnnnnnnnnnnnnnnnnnnnnnnnnnnnnnnnnnnnnnnnnnnnnnnnnnnnnnnnnnnnnnnnnnnnnnnnnnnnnnnnnnnnnnnnnnnnnnnnnnnnnnnnnnnnnnnnnnnnnnnnnnnnnnnnnnnnnnnnnnnnnnnnnnnnnnnnnnnnnnnnnnnnnnnnnnnnnnnnnnnnnnnnnnnnnnnnnnnnnnnnnnnnnnnnnnnnnnnnnnnnnnnnnnnnnnnnnnnnnnnnnnnnnnnnnnnnnnnnnnnnnnnnnnnnnnnnnnnnnnnnnnnnnnnnnnnnnnnnnnnnnnnnnnnnnnnnnnnnnnnnnnnnnnnnnnnnnnnnnnnnnnnnnnnnnnnnnnnnnnnnnnnnnnnnnnnnnnnnnnnnnnnnnnnnnnnnnnnnnnnnnnnnnnnnnnnnnnnnnnnnnnnnnnnnnnnnnnnnnnnnnnnnnnnnnnnnnnnnnnnnnnnnnnnnnnnnnnnnnnnnnnnnnnnnnnnnnnnnnnnnnnnnnnnnnnnnnnnnnnnnnnnnnnnnnnnnnnnnnnnnnnnnnnnnnnnnnnnnnnnnnnnnnnnnnnnnnnnnnnnnnnnnnnnnnnnnnnnnnnnnnnnnnnnnnnnnnnnnnnnnnnnnnnnnnnnnnnnnnnnnnnnnnnnnnnnnnnnnnnnnnnnnnnnnnnnnnnnnnnnnnnnnnnnnnnnnnnnnnnnnnnnnnnnnnnnnnnnnnnnnnnnnnnnnnnnnnnnnnnnnnnnnnnnnnnnnnnnnnnnnnnnnnnnnnnnnnnnnnnnnnnnnnnnnnnnnnnnnnnnnnnnnnnnnnnnnnnnnnnnnnnnnnnnnnnnnnnnnnnnnnnnnnnnnnnnnnnnnnnnnnnnnnnnnnnnnnnnnnnnnnnnnnnnnnnnnnnnnnnnnnnnnnnnnnnnnnnnnnnnnnnnnnnnnnnnnnnnnnnnnnnnnnnnnnnnnnnnnnnnnnnnnnnnnnnnnnnnnnnnnnnnnnnnnnnnnnnnnnnnnnnnnnnnnnnnnnnnnnnnnnnnnnnnnnnnnnnnnnnnnnnnnnnnnnnnnnnnnnnnnnnnnnnnnnnnnnnnnnnnnnnnnnnnnnnnnnnnnnnnnnnnnnnnnnnnnnnnnnnnnnnnnnnnnnnnnnnnnnnnnnnnnnnnnnnnnnnnnnnnnnnnnnnnnnnnnnnnnnnnnnnnnnnnnnnnnnnnnnnnnnnnnnnnnnnnnnnnnnnnnnnnnnnnnnnnnnnnnnnnnnnnnnnnnnnnnnnnnnnnnnnnnnnnnnnnnnnnnnnnnnnnnnnnnnnnnnnnnnnnnnnnnnnnnnnnnnnnnnnnnnnnnnnnnnnnnnnnnnnnnnnnnnnnnnnnnnnnnnnnnnnnnnnnnnnnnnnnnnnnnnnnnnnnnnnnnnnnnnnnnnnnnnnnnnnnnnnnnnnnnnnnnnnnnnnnnnnnnnnnnnnnnnnnnnnnnnnnnnnnnnnnnnnnnnnnnnnnnnnnnnnnnnnnnnnnnnnnnnnnnnnnnnnnnnnnnnnnnnnnnnnnnnnnnnnnnnnnnnnnnnnnnnnnnnnnnnnnnnnnnnnnnnnnnnnnnnnnnnnnnnnnnnnnnnnnnnnnnnnnnnnnnnnnnnnnnnnnnnnnnnnnnnnnnnnnnnnnnnnnnnnnnnnnnnnnnnnnnnnnnnnnnnnnnnnnnnnnnnnnnnnnnnnnnnnnnnnnnnnnnnnnnnnnnnnnnnnnnnnnnnnnnnnnnnnnnnnnnnnnnnnnnnnnnnnnnnnnnnnnnnnnnnnnnnnnnnnnnnnnnnnnnnnnnnnnnnnnnnnnnnnnnnnnnnnnnnnnnnnnnnnnnnnnnnnnnnnnnnnnnnnnnnnnnnnnnnnnnnnnnnnnnnnnnnnnnnnnnnnnnnnnnnnnnnnnnnnnnnnnnnnnnnnnnnnnnnnnnnnnnnnnnnnnnnnnnnnnnnnnnnnnnnnnnnnnnnnnnnnnnnnnnnnnnnnnnnnnnnnnnnnnnnnnnnnnnnnnnnnnnnnnnnnnnnnnnnnnnnnnnnnnnnnnnnnnnnnnnnnnnnnnnnnnnnnnnnnnnnnnnnnnnnnnnnnnnnnnnnnnnnnnnnnnnnnnnnnnnnnnnnnnnnnnnnnnnnnnnnnnnnnnnnnnnnnnnnnnnnnnnnnnnnnnnnnnnnnnnnnnnnnnnnnnnnnnnnnnnnnnnnnnnnnnnnnnnnnnnnnnnnnnnnnnnnnnnnnnnnnnnnnnnnnnnnnnnnnnnnnnnnnnnnnnnnnnnnnnnnnnnnnnnnnnnnnnnnnnnnnnnnnnnnnnnnnnnnnnnnnnnnnnnnnnnnnnnnnnnnnnnnnnnnnnnnnnnnnnnnnnnnnnnnnnnnnnnnnnnnnnnnnnnnnnnnnnnnnnnnnnnnnnnnnnnnnnnnnnnnnnnnnnnnnnnnnnnnnnnnnnnnnnnnnnnnnnnnnnnnnnnnnnnnnnnnnnnnnnnnnnnnnnnnnnnnnnnnnnnnnnnnnnnnnnnnnnnnnnnnnnnnnnnnnnnnnnnnnnnnnnnnnnnnnnnnnnnnnnnnnnnnnnnnnnnnnnnnnnnnnnnnnnnnnnnnnnnnnnnnnnnnnnnnnnnnnnnnnnnnnnnnnnnnnnnnnnnnnnnnnnnnnnnnnnnnnnnnnnnnnnnnnnnnnnnnnnnnnnnnnnnnnnnnnnnnnnnnnnnnnnnnnnnnnnnnnnnnnnnnnnnnnnnnnnnnnnnnnnnnnnnnnnnnnnnnnnnnnnnnnnnnnnnnnnnnnnnnnnnnnnnnnnnnnnnnnnnnnnnnnnnnnnnnnnnnnnnnnnnnnnnnnnnnnnnnnnnnnnnnnnnnnnnnnnnnnnnnnnnnnnnnnnnnnnnnnnnnnnnnnnnnnnnnnnnnnnnnnnnnnnnnnnnnnnnnnnnnnnnnnnnnnnnnnnnnnnnnnnnnnnnnnnnnnnnnnnnnnnnnnnnnnnnnnnnnnnnnnnnnnnnnnnnnnnnnnnnnnnnnnnnnnnnnnnnnnnnnnnnnnnnnnnnnnnnnnnnnnnnnnnnnnnnnnnnnnnnnnnnnnnnnnnnnnnnnnnnnnnnnnnnnnnnnnnnnnnnnnnnnnnnnnnnnnnnnnnnnnnnnnnnnnnnnnnnnnnnnnnnnnnnnnnnnnnnnnnnnnnnnnnnnnnnnnnnnnnnnnnnnnnnnnnnnnnnnnnnnnnnnnnnnnnnnnnnnnnnnnnnnnnnnnnnnnnnnnnnnnnnnnnnnnnnnnnnnnnnnnnnnnnnnnnnnnnnnnnnnnnnnnnnnnnnnnnnnnnnnnnnnnnnnnnnnnnnnnnnnnnnnnnnnnnnnnnnnnnnnnnnnnnnnnnnnnnnnnnnnnnnnnnnnnnnnnnnnnnnnnnnnnnnnnnnnnnnnnnnnnnnnnnnnnnnnnnnnnnnnnnnnnnnnnnnnnnnnnnnnnnnnnnnnnnnnnnnnnnnnnnnnnnnnnnnnnnnnnnnnnnnnnnnnnnnnnnnnnnnnnnnnnnnnnnnnnnnnnnnnnnnnnnnnnnnnnnnnnnnnnnnnnnnnnnnnnnnnnnnnnnnnnnnnnnnnnnnnnnnnnnnnnnnnnnnnnnnnnnnnnnnnnnnnnnnnnnnnnnnnnnnnnnnnnnnnnnnnnnnnnnnnnnnnnnnnnnnnnnnnnnnnnnnnnnnnnnnnnnnnnnnnnnnnnnnnnnnnnnnnnnnnnnnnnnnnnnnnnnnnnnnnnnnnnnnnnnnnnnnnnnnnnnnnnnnnnnnnnnnnnnnnnnnnnnnnnnnnnnnnnnnnnnnnnnnnnnnnnnnnnnnnnnnnnnnnnnnnnnnnnnnnnnnnnnnnnnnnnnnnnnnnnnnnnnnnnnnnnnnnnnnnnnnnnnnnnnnnnnnnnnnnnnnnnnnnnnnnnnnnnnnnnnnnnnnnnnnnnnnnnnnnnnnnnnnnnnnnnnnnnnnnnnnnnnnnnnnnnnnnnnnnnnnnnnnnnnnnnnnnnnnnnnnnnnnnnnnnnnnnnnnnnnnnnnnnnnnnnnnnnnnnnnnnnnnnnnnnnnnnnnnnnnnnnnnnnnnnnnnnnnnnnnnnnnnnnnnnnnnnnnnnnnnnnnnnnnnnnnnnnnnnnnnnnnnnnnnnnnnnnnnnnnnnnnnnnnnnnnnnnnnnnnnnnnnnnnnnnnnnnnnnnnnnnnnnnnnnnnnnnnnnnnnnnnnnnnnnnnnnnnnnnnnnnnnnnnnnnnnnnnnnnnnnnnnnnnnnnnnnnnnnnnnnnnnnnnnnnnnnnnnnnnnnnnnnnnnnnnnnnnnnnnnnnnnnnnnnnnnnnnnnnnnnnnnnnnnnnnnnnnnnnnnnnnnnnnnnnnnnnnnnnnnnnnnnnnnnnnnnnnnnnnnnnnnnnnnnnnnnnnnnnnnnnnnnnnnnnnnnnnnnnnnnnnnnnnnnnnnnnnnnnnnnnnnnnnnnnnnnnnnnnnnnnnnnnnnnnnnnnnnnnnnnnnnnnnnnnnnnnnnnnnnnnnnnnnnnnnnnnnnnnnnnnnnnnnnnnnnnnnnnnnnnnnnnnnnnnnnnnnnnnnnnnnnnnnnnnnnnnnnnnnnnnnnnnnnnnnnnnnnnnnnnnnnnnnnnnnnnnnnnnnnnnnnnnnnnnnnnnnnnnnnnnnnnnnnnnnnnnnnnnnnnnnnnnnnnnnnnnnnnnnnnnnnnnnnnnnnnnnnnnnnnnnnnnnnnnnnnnnnnnnnnnnnnnnnnnnnnnnnnnnnnnnnnnnnnnnnnnnnnnnnnnnnnnnnnnnnnnnnnnnnnnnnnnnnnnnnnnnnnnnnnnnnnnnnnnnnnnnnnnnnnnnnnnnnnnnnnnnnnnnnnnnnnnnnnnnnnnnnnnnnnnnnnnnnnnnnnnnnnnnnnnnnnnnnnnnnnnnnnnnnnnnnnnnnnnnnnnnnnnnnnnnnnnnnnnnnnnnnnnnnnnnnnnnnnnnnnnnnnnnnnnnnnnnnnnnnnnnnnnnnnnnnnnnnnnnnnnnnnnnnnnnnnnnnnnnnnnnnnnnnnnnnnnnnnnnnnnnnnnnnnnnnnnnnnnnnnnnnnnnnnnnnnnnnnnnnnnnnnnnnnnnnnnnnnnnnnnnnnnnnnnnnnnnnnnnnnnnnnnnnnnnnnnnnnnnnnnnnnnnnnnnnnnnnnnnnnnnnnnnnnnnnnnnnnnnnnnnnnnnnnnnnnnnnnnnnnnnnnnnnnnnnnnnnnnnnnnnnnnnnnnnnnnnnnnnnnnnnnnnnnnnnnnnnnnnnnnnnnnnnnnnnnnnnnnnnnnnnnnnnnnnnnnnnnnnnnnnnnnnnnnnnnnnnnnnnnnnnnnnnnnnnnnnnnnnnnnnnnnnnnnnnnnnnnnnnnnnnnnnnnnnnnnnnnnnnnnnnnnnnnnnnnnnnnnnnnnnnnnnnnnnnnnnnnnnnnnnnnnnnnnnnnnnnnnnnnnnnnnnnnnnnnnnnnnnnnnnnnnnnnnnnnnnnnnnnnnnnnnnnnnnnnnnnnnnnnnnnnnnnnnnnnnnnnnnnnnnnnnnnnnnnnnnnnnnnnnnnnnnnnnnnnnnnnnnnnnnnnnnnnnnnnnnnnnnnnnnnnnnnnnnnnnnnnnnnnnnnnnnnnnnnnnnnnnnnnnnnnnnnnnnnnnnnnnnnnnnnnnnnnnnnnnnnnnnnnnnnnnnnnnnnnnnnnnnnnnnnnnnnnnnnnnnnnnnnnnnnnnnnnnnnnnnnnnnnnnnnnnnnnnnnnnnnnnnnnnnnnnnnnnnnnnnnnnnnnnnnnnnnnnnnnnnnnnnnnnnnnnnnnnnnnnnnnnnnnnnnnnnnnnnnnnnnnnnnnnnnnnnnnnnnnnnnnnnnnnnnnnnnnnnnnnnnnnnnnnnnnnnnnnnnnnnnnnnnnnnnnnnnnnnnnnnnnnnnnnnnnnnnnnnnnnnnnnnnnnnnnnnnnnnnnnnnnnnnnnnnnnnnnnnnnnnnnnnnnnnnnnnnnnnnnnnnnnnnnnnnnnnnnnnnnnnnnnnnnnnnnnnnnnnnnnnnnnnnnnnnnnnnnnnnnnnnnnnnnnnnnnnnnnnnnnnnnnnnnnnnnnnnnnnnnnnnnnnnnnnnnnnnnnnnnnnnnnnnnnnnnnnnnnnnnnnnnnnnnnnnnnnnnnnnnnnnnnnnnnnnnnnnnnnnnnnnnnnnnnnnnnnnnnnnnnnnnnnnnnnnnnnnnnnnnnnnnnnnnnnnnnnnnnnnnnnnnnnnnnnnnnnnnnnnnnnnnnnnnnnnnnnnnnnnnnnnnnnnnnnnnnnnnnnnnnnnnnnnnnnnnnnnnnnnnnnnnnnnnnnnnnnnnnnnnnnnnnnnnnnnnnnnnnnnnnnnnnnnnnnnnnnnnnnnnnnnnnnnnnnnnnnnnnnnnnnnnnnnnnnnnnnnnnnnnnnnnnnnnnnnnnnnnnnnnnnnnnnnnnnnnnnnnnnnnnnnnnnnnnnnnnnnnnnnnnnnnnnnnnnnnnnnnnnnnnnnnnnnnnnnnnnnnnnnnnnnnnnnnnnnnnnnnnnnnnnnnnnnnnnnnnnnnnnnnnnnnnnnnnnnnnnnnnnnnnnnnnnnnnnnnnnnnnnnnnnnnnnnnnnnnnnnnnnnnnnnnnnnnnnnnnnnnnnnnnnnnnnnnnnnnnnnnnnnnnnnnnnnnnnnnnnnnnnnnnnnnnnnnnnnnnnnnnnnnnnnnnnnnnnnnnnnnnnnnnnnnnnnnnnnnnnnnnnnnnnnnnnnnnnnnnnnnnnnnnnnnnnnnnnnnnnnnnnnnnnnnnnnnnnnnnnnnnnnnnnnnnnnnnnnnnnnnnnnnnnnnnnnnnnnnnnnnnnnnnnnnnnnnnnnnnnnnnnnnnnnnnnnnnnnnnnnnnnnnnnnnnnnnnnnnnnnnnnnnnnnnnnnnnnnnnnnnnnnnnnnnnnnnnnnnnnnnnnnnnnnnnnnnnnnnnnnnnnnnnnnnnnnnnnnnnnnnnnnnnnnnnnnnnnnnnnnnnnnnnnnnnnnnnnnnnnnnnnnnnnnnnnnnnnnnnnnnnnnnnnnnnnnnnnnnnnnnnnnnnnnnnnnnnnnnnnnnnnnnnnnnnnnnnnnnnnnnnnnnnnnnnnnnnnnnnnnnnnnnnnnnnnnnnnnnnnnnnnnnnnnnnnnnnnnnnnnnnnnnnnnnnnnnnnnnnnnnnnnnnnnnnnnnnnnnnnnnnnnnnnnnnnnnnnnnnnnnnnnnnnnnnnnnnnnnnnnnnnnnnnnnnnnnnnnnnnnnnnnnnnnnnnnnnnnnnnnnnnnnnnnnnnnnnnnnnnnnnnnnnnnnnnnnnnnnnnnnnnnnnnnnnnnnnnnnnnnnnnnnnnnnnnnnnnnnnnnnnnnnnnnnnnnnnnnnnnnnnnnnnnnnnnnnnnnnnnnnnnnnnnnnnnnnnnnnnnnnnnnnnnnnnnnnnnnnnnnnnnnnnnnnnnnnnnnnnnnnnnnnnnnnnnnnnnnnnnnnnnnnnnnnnnnnnnnnnnnnnnnnnnnnnnnnnnnnnnnnnnnnnnnnnnnnnnnnnnnnnnnnnnnnnnnnnnnnnnnnnnnnnnnnnnnnnnnnnnnnnnnnnnnnnnnnnnnnnnnnnnnnnnnnnnnnnnnnnnnnnnnnnnnnnnnnnnnnnnnnnnnnnnnnnnnnnnnnnnnnnnnnnnnnnnnnnnnnnnnnnnnnnnnnnnnnnnnnnnnnnnnnnnnnnnnnnnnnnnnnnnnnnnnnnnnnnnnnnnnnnnnnnnnnnnnnnnnnnnnnnnnnnnnnnnnnnnnnnnnnnnnnnnnnnnnnnnnnnnnnnnnnnnnnnnnnnnnnnnnnnnnnnnnnnnnnnnnnnnnnnnnnnnnnnnnnnnnnnnnnnnnnnnnnnnnnnnnnnnnnnnnnnnnnnnnnnnnnnnnnnnnnnnnnnnnnnnnnnnnnnnnnnnnnnnnnnnnnnnnnnnnnnnnnnnnnnnnnnnnnnnnnnnnnnnnnnnnnnnnnnnnnnnnnnnnnnnnnnnnnnnnnnnnnnnnnnnnnnnnnnnnnnnnnnnnnnnnnnnnnnnnnnnnnnnnnnnnnnnnnnnnnnnnnnnnnnnnnnnnnnnnnnnnnnnnnnnnnnnnnnnnnnnnnnnnnnnnnnnnnnnnnnnnnnnnnnnnnnnnnnnnnnnnnnnnnnnnnnnnnnnnnnnnnnnnnnnnnnnnnnnnnnnnnnnnnnnnnnnnnnnnnnnnnnnnnnnnnnnnnnnnnnnnnnnnnnnnnnnnnnnnnnnnnnnnnnnnnnnnnnnnnnnnnnnnnnnnnnnnnnnnnnnnnnnnnnnnnnnnnnnnnnnnnnnnnnnnnnnnnnnnnnnnnnnnnnnnnnnnnnnnnnnnnnnnnnnnnnnnnnnnnnnnnnnnnnnnnnnnnnnnnnnnnnnnnnnnnnnnnnnnnnnnnnnnnnnnnnnnnnnnnnnnnnnnnnnnnnnnnnnnnnnnnnnnnnnnnnnnnnnnnnnnnnnnnnnnnnnnnnnnnnnnnnnnnnnnnnnnnnnnnnnnnnnnnnnnnnnnnnnnnnnnnnnnnnnnnnnnnnnnnnnnnnnnnnnnnnnnnnnnnnnnnnnnnnnnnnnnnnnnnnnnnnnnnnnnnnnnnnnnnnnnnnnnnnnnnnnnnnnnnnnnnnnnnnnnnnnnnnnnnnnnnnnnnnnnnnnnnnnnnnnnnnnnnnnnnnnnnnnnnnnnnnnnnnnnnnnnnnnnnnnnnnnnnnnnnnnnnnnnnnnnnnnnnnnnnnnnnnnnnnnnnnnnnnnnnnnnnnnnnnnnnnnnnnnnnnnnnnnnnnnnnnnnnnnnnnnnnnnnnnnnnnnnnnnnnnnnnnnnnnnnnnnnnnnnnnnnnnnnnnnnnnnnnnnnnnnnnnnnnnnnnnnnnnnnnnnnnnnnnnnnnnnnnnnnnnnnnnnnnnnnnnnnnnnnnnnnnnnnnnnnnnnnnnnnnnnnnnnnnnnnnnnnnnnnnnnnnnnnnnnnnnnnnnnnnnnnnnnnnnnnnnnnnnnnnnnnnnnnnnnnnnnnnnnnnnnnnnnnnnnnnnnnnnnnnnnnnnnnnnnnnnnnnnnnnnnnnnnnnnnnnnnnnnnnnnnnnnnnnnnnnnnnnnnnnnnnnnnnnnnnnnnnnnnnnnnnnnnnnnnnnnnnnnnnnnnnnnnnnnnnnnnnnnnnnnnnnnnnnnnnnnnnnnnnnnnnnnnnnnnnnnnnnnnnnnnnnnnnnnnnnnnnnnnnnnnnnnnnnnnnnnnnnnnnnnnnnnnnnnnnnnnnnnnnnnnnnnnnnnnnnnnnnnnnnnnnnnnnnnnnnnnnnnnnnnnnnnnnnnnnnnnnnnnnnnnnnnnnnnnnnnnnnnnnnnnnnnnnnnnnnnnnnnnnnnnnnnnnnnnnnnnnnnnnnnnnnnnnnnnnnnnnnnnnnnnnnnnnnnnnnnnnnnnnnnnnnnnnnnnnnnnnnnnnnnnnnnnnnnnnnnnnnnnnnnnnnnnnnnnnnnnnnnnnnnnnnnnnnnnnnnnnnnnnnnnnnnnnnnnnnnnnnnnnnnnnnnnnnnnnnnnnnnnnnnnnnnnnnnnnnnnnnnnnnnnnnnnnnnnnnnnnnnnnnnnnnnnnnnnnnnnnnnnnnnnnnnnnnnnnnnnnnnnnnnnnnnnnnnnnnnnnnnnnnnnnnnnnnnnnnnnnnnnnnnnnnnnnnnnnnnnnnnnnnnnnnnnnnnnnnnnnnnnnnnnnnnnnnnnnnnnnnnnnnnnnnnnnnnnnnnnnnnnnnnnnnnnnnnnnnnnnnnnnnnnnnnnnnnnnnnnnnnnnnnnnnnnnnnnnnnnnnnnnnnnnnnnnnnnnnnnnnnnnnnnnnnnnnnnnnnnnnnnnnnnnnnnnnnnnnnnnnnnnnnnnnnnnnnnnnnnnnnnnnnnnnnnnnnnnnnnnnnnnnnnnnnnnnnnnnnnnnnnnnnnnnnnnnnnnnnnnnnnnnnnnnnnnnnnnnnnnnnnnnnnnnnnnnnnnnnnnnnnnnnnnnnnnnnnnnnnnnnnnnnnnnnnnnnnnnnnnnnnnnnnnnnnnnnnnnnnnnnnnnnnnnnnnnnnnnnnnnnnnnnnnnnnnnnnnnnnnnnnnnnnnnnnnnnnnnnnnnnnnnnnnnnnnnnnnnnnnnnnnnnnnnnnnnnnnnnnnnnnnnnnnnnnnnnnnnnnnnnnnnnnnnnnnnnnnnnnnnnnnnnnnnnnnnnnnnnnnnnnnnnnnnnnnnnnnnnnnnnnnnnnnnnnnnnnnnnnnnnnnnnnnnnnnnnnnnnnnnnnnnnnnnnnnnnnnnnnnnnnnnnnnnnnnnnnnnnnnnnnnnnnnnnnnnnnnnnnnnnnnnnnnnnnnnnnnnnnnnnnnnnnnnnnnnnnnnnnnnnnnnnnnnnnnnnnnnnnnnnnnnnnnnnnnnnnnnnnnnnnnnnnnnnnnnnnnnnnnnnnnnnnnnnnnnnnnnnnnnnnnnnnnnnnnnnnnnnnnnnnnnnnnnnnnnnnnnnnnnnnnnnnnnnnnnnnnnnnnnnnnnnnnnnnnnnnnnnnnnnnnnnnnnnnnnnnnnnnnnnnnnnnnnnnnnnnnnnnnnnnnnnnnnnnnnnnnnnnnnnnnnnnnnnnnnnnnnnnnnnnnnnnnnnnnnnnnnnnnnnnnnnnnnnnnnnnnnnnnnnnnnnnnnnnnnnnnnnnnnnnnnnnnnnnnnnnnnnnnnnnnnnnnnnnnnnnnnnnnnnnnnnnnnnnnnnnnnnnnnnnnnnnnnnnnnnnnnnnnnnnnnnnnnnnnnnnnnnnnnnnnnnnnnnnnnnnnnnnnnnnnnnnnnnnnnnnnnnnnnnnnnnnnnnnnnnnnnnnnnnnnnnnnnnnnnnnnnnnnnnnnnnnnnnnnnnnnnnnnnnnnnnnnnnnnnnnnnnnnnnnnnnnnnnnnnnnnnnnnnnnnnnnnnnnnnnnnnnnnnnnnnnnnnnnnnnnnnnnnnnnnnnnnnnnnnnnnnnnnnnnnnnnnnnnnnnnnnnnnnnnnnnnnnnnnnnnnnnnnnnnnnnnnnnnnnnnnnnnnnnnnnnnnnnnnnnnnnnnnnnnnnnnnnnnnnnnnnnnnnnnnnnnnnnnnnnnnnnnnnnnnnnnnnnnnnnnnnnnnnnnnnnnnnnnnnnnnnnnnnnnnnnnnnnnnnnnnnnnnnnnnnnnnnnnnnnnnnnnnnnnnnnnnnnnnnnnnnnnnnnnnnnnnnnnnnnnnnnnnnnnnnnnnnnnnnnnnnnnnnnnnnnnnnnnnnnnnnnnnnnnnnnnnnnnnnnnnnnnnnnnnnnnnnnnnnnnnnnnnnnnnnnnnnnnnnnnnnnnnnnnnnnnnnnnnnnnnnnnnnnnnnnnnnnnnnnnnnnnnnnnnnnnnnnnnnnnnnnnnnnnnnnnnnnnnnnnnnnnnnnnnnnnnnnnnnnnnnnnnnnnnnnnnnnnnnnnnnnnnnnnnnnnnnnnnnnnnnnnnnnnnnnnnnnnnnnnnnnnnnnnnnnnnnnnnnnnnnnnnnnnnnnnnnnnnnnnnnnnnnnnnnnnnnnnnnnnnnnnnnnnnnnnnnnnnnnnnnnnnnnnnnnnnnnnnnnnnnnnnnnnnnnnnnnnnnnnnnnnnnnnnnnnnnnnnnnnnnnnnnnnnnnnnnnnnnnnnnnnnnnnnnnnnnnnnnnnnnnnnnnnnnnnnnnnnnnnnnnnnnnnnnnnnnnnnnnnnnnnnnnnnnnnnnnnnnnnnnnnnnnnnnnnnnnnnnnnnnnnnnnnnnnnnnnnnnnnnnnnnnnnnnnnnnnnnnnnnnnnnnnnnnnnnnnnnnnnnnnnnnnnnnnnnnnnnnnnnnnnnnnnnnnnnnnnnnnnnnnnnnnnnnnnnnnnnnnnnnnnnnnnnnnnnnnnnnnnnnnnnnnnnnnnnnnnnnnnnnnnnnnnnnnnnnnnnnnnnnnnnnnnnnnnnnnnnnnnnnnnnnnnnnnnnnnnnnnnnnnnnnnnnnnnnnnnnnnnnnnnnnnnnnnnnnnnnnnnnnnnnnnnnnnnnnnnnnnnnnnnnnnnnnnnnnnnnnnnnnnnnnnnnnnnnnnnnnnnnnnnnnnnnnnnnnnnnnnnnnnnnnnnnnnnnnnnnnnnnnnnnnnnnnnnnnnnnnnnnnnnnnnnnnnnnnnnnnnnnnnnnnnnnnnnnnnnnnnnnnnnnnnnnnnnnnnnnnnnnnnnnnnnnnnnnnnnnnnnnnnnnnnnnnnnnnnnnnnnnnnnnnnnnnnnnnnnnnnnnnnnnnnnnnnnnnnnnnnnnnnnnnnnnnnnnnnnnnnnnnnnnnnnnnnnnnnnnnnnnnnnnnnnnnnnnnnnnnnnnnnnnnnnnnnnnnnnnnnnnnnnnnnnnnnnnnnnnnnnnnnnnnnnnnnnnnnnnnnnnnnnnnnnnnnnnnnnnnnnnnnnnnnnnnnnnnnnnnnnnnnnnnnnnnnnnnnnnnnnnnnnnnnnnnnnnnnnnnnnnnnnnnnnnnnnnnnnnnnnnnnnnnnnnnnnnnnnnnnnnnnnnnnnnnnnnnnnnnnnnnnnnnnnnnnnnnnnnnnnnnnnnnnnnnnnnnnnnnnnnnnnnnnnnnnnnnnnnnnnnnnnnnnnnnnnnnnnnnnnnnnnnnnnnnnnnnnnnnnnnnnnnnnnnnnnnnnnnnnnnnnnnnnnnnnnnnnnnnnnnnnnnnnnnnnnnnnnnnnnnnnnnnnnnnnnnnnnnnnnnnnnnnnnnnnnnnnnnnnnnnnnnnnnnnnnnnnnnnnnnnnnnnnnnnnnnnnnnnnnnnnnnnnnnnnnnnnnnnnnnnnnnnnnnnnnnnnnnnnnnnnnnnnnnnnnnnnnnnnnnnnnnnnnnnnnnnnnnnnnnnnnnnnnnnnnnnnnnnnnnnnnnnnnnnnnnnnnnnnnnnnnnnnnnnnnnnnnnnnnnnnnnnnnnnnnnnnnnnnnnnnnnnnnnnnnnnnnnnnnnnnnnnnnnnnnnnnnnnnnnnnnnnnnnnnnnnnnnnnnnnnnnnnnnnnnnnnnnnnnnnnnnnnnnnnnnnnnnnnnnnnnnnnnnnnnnnnnnnnnnnnnnnnnnnnnnnnnnnnnnnnnnnnnnnnnnnnnnnnnnnnnnnnnnnnnnnnnnnnnnnnnnnnnnnnnnnnnnnnnnnnnnnnnnnnnnnnnnnnnnnnnnnnnnnnnnnnnnnnnnnnnnnnnnnnnnnnnnnnnnnnnnnnnnnnnnnnnnnnnnnnnnnnnnnnnnnnnnnnnnnnnnnnnnnnnnnnnnnnnnnnnnnnnnnnnnnnnnnnnnnnnnnnnnnnnnnnnnnnnnnnnnnnnnnnnnnnnnnnnnnnnnnnnnnnnnnnnnnnnnnnnnnnnnnnnnnnnnnnnnnnnnnnnnnnnnnnnnnnnnnnnnnnnnnnnnnnnnnnnnnnnnnnnnnnnnnnnnnnnnnnnnnnnnnnnnnnnnnnnnnnnnnnnnnnnnnnnnnnnnnnnnnnnnnnnnnnnnnnnnnnnnnnnnnnnnnnnnnnnnnnnnnnnnnnnnnnnnnnnnnnnnnnnnnnnnnnnnnnnnnnnnnnnnnnnnnnnnnnnnnnnnnnnnnnnnnnnnnnnnnnnnnnnnnnnnnnnnnnnnnnnnnnnnnnnnnnnnnnnnnnnnnnnnnnnnnnnnnnnnnnnnnnnnnnnnnnnnnnnnnnnnnnnnnnnnnnnnnnnnnnnnnnnnnnnnnnnnnnnnnnnnnnnnnnnnnnnnnnnnnnnnnnnnnnnnnnnnnnnnnnnnnnnnnnnnnnnnnnnnnnnnnnnnnnnnnnnnnnnnnnnnnnnnnnnnnnnnnnnnnnnnnnnnnnnnnnnnnnnnnnnnnnnnnnnnnnnnnnnnnnnnnnnnnnnnnnnnnnnnnnnnnnnnnnnnnnnnnnnnnnnnnnnnnnnnnnnnnnnnnnnnnnnnnnnnnnnnnnnnnnnnnnnnnnnnnnnnnnnnnnnnnnnnnnnnnnnnnnnnnnnnnnnnnnnnnnnnnnnnnnnnnnnnnnnnnnnnnnnnnnnnnnnnnnnnnnnnnnnnnnnnnnnnnnnnnnnnnnnnnnnnnnnnnnnnnnnnnnnnnnnnnnnnnnnnnnnnnnnnnnnnnnnnnnnnnnnnnnnnnnnnnnnnnnnnnnnnnnnnnnnnnnnnnnnnnnnnnnnnnnnnnnnnnnnnnnnnnnnnnnnnnnnnnnnnnnnnnnnnnnnnnnnnnnnnnnnnnnnnnnnnnnnnnnnnnnnnnnnnnnnnnnnnnnnnnnnnnnnnnnnnnnnnnnnnnnnnnnnnnnnnnnnnnnnnnnnnnnnnnnnnnnnnnnnnnnnnnnnnnnnnnnnnnnnnnnnnnnnnnnnnnnnnnnnnnnnnnnnnnnnnnnnnnnnnnnnnnnnnnnnnnnnnnnnnnnnnnnnnnnnnnnnnnnnnnnnnnnnnnnnnnnnnnnnnnnnnnnnnnnnnnnnnnnnnnnnnnnnnnnnnnnnnnnnnnnnnnnnnnnnnnnnnnnnnnnnnnnnnnnnnnnnnnnnnnnnnnnnnnnnnnnnnnnnnnnnnnnnnnnnnnnnnnnnnnnnnnnnnnnnnnnnnnnnnnnnnnnnnnnnnnnnnnnnnnnnnnnnnnnnnnnnnnnnnnnnnnnnnnnnnnnnnnnnnnnnnnnnnnnnnnnnnnnnnnnnnnnnnnnnnnnnnnnnnnnnnnnnnnnnnnnnnnnnnnnnnnnnnnnnnnnnnnnnnnnnnnnnnnnnnnnnnnnnnnnnnnnnnnnnnnnnnnnnnnnnnnnnnnnnnnnnnnnnnnnnnnnnnnnnnnnnnnnnnnnnnnnnnnnnnnnnnnnnnnnnnnnnnnnnnnnnnnnnnnnnnnnnnnnnnnnnnnnnnnnnnnnnnnnnnnnnnnnnnnnnnnnnnnnnnnnnnnnnnnnnnnnnnnnnnnnnnnnnnnnnnnnnnnnnnnnnnnnnnnnnnnnnnnnnnnnnnnnnnnnnnnnnnnnnnnnnnnnnnnnnnnnnnnnnnnnnnnnnnnnnnnnnnnnnnnnnnnnnnnnnnnnnnnnnnnnnnnnnnnnnnnnnnnnnnnnnnnnnnnnnnnnnnnnnnnnnnnnnnnnnnnnnnnnnnnnnnnnnnnnnnnnnnnnnnnnnnnnnnnnnnnnnnnnnnnnnnnnnnnnnnnnnnnnnnnnnnnnnnnnnnnnnnnnnnnnnnnnnnnnnnnnnnnnnnnnnnnnnnnnnnnnnnnnnnnnnnnnnnnnnnnnnnnnnnnnnnnnnnnnnnnnnnnnnnnnnnnnnnnnnnnnnnnnnnnnnnnnnnnnnnnnnnnnnnnnnnnnnnnnnnnnnnnnnnnnnnnnnnnnnnnnnnnnnnnnnnnnnnnnnnnnnnnnnnnnnnnnnnnnnnnnnnnnnnnnnnnnnnnnnnnnnnnnnnnnnnnnnnnnnnnnnnnnnnnnnnnnnnnnnnnnnnnnnnnnnnnnnnnnnnnnnnnnnnnnnnnnnnnnnnnnnnnnnnnnnnnnnnnnnnnnnnnnnnnnnnnnnnnnnnnnnnnnnnnnnnnnnnnnnnnnnnnnnnnnnnnnnnnnnnnnnnnnnnnnnnnnnnnnnnnnnnnnnnnnnnnnnnnnnnnnnnnnnnnnnnnnnnnnnnnnnnnnnnnnnnnnnnnnnnnnnnnnnnnnnnnnnnnnnnnnnnnnnnnnnnnnnnnnnnnnnnnnnnnnnnnnnnnnnnnnnnnnnnnnnnnnnnnnnnnnnnnnnnnnnnnnnnnnnnnnnnnnnnnnnnnnnnnnnnnnnnnnnnnnnnnnnnnnnnnnnnnnnnnnnnnnnnnnnnnnnnnnnnnnnnnnnnnnnnnnnnnnnnnnnnnnnnnnnnnnnnnnnnnnnnnnnnnnnnnnnnnnnnnnnnnnnnnnnnnnnnnnnnnnnnnnnnnnnnnnnnnnnnnnnnnnnnnnnnnnnnnnnnnnnnnnnnnnnnnnnnnnnnnnnnnnnnnnnnnnnnnnnnnnnnnnnnnnnnnnnnnnnnnnnnnnnnnnnnnnnnnnnnnnnnnnnnnnnnnnnnnnnnnnnnnnnnnnnnnnnnnnnnnnnnnnnnnnnnnnnnnnnnnnnnnnnnnnnnnnnnnnnnnnnnnnnnnnnnnnnnnnnnnnnnnnnnnnnnnnnnnnnnnnnnnnnnnnnnnnnnnnnnnnnnnnnnnnnnnnnnnnnnnnnnnnnnnnnnnnnnnnnnnnnnnnnnnnnnnnnnnnnnnnnnnnnnnnnnnnnnnnnnnnnnnnnnnnnnnnnnnnnnnnnnnnnnnnnnnnnnnnnnnnnnnnnnnnnnnnnnnnnnnnnnnnnnnnnnnnnnnnnnnnnnnnnnnnnnnnnnnnnnnnnnnnnnnnnnnnnnnnnnnnnnnnnnnnnnnnnnnnnnnnnnnnnnnnnnnnnnnnnnnnnnnnnnnnnnnnnnnnnnnnnnnnnnnnnnnnnnnnnnnnnnnnnnnnnnnnnnnnnnnnnnnnnnnnnnnnnnnnnnnnnnnnnnnnnnnnnnnnnnnnnnnnnnnnnnnnnnnnnnnnnnnnnnnnnnnnnnnnnnnnnnnnnnnnnnnnnnnnnnnnnnnnnnnnnnnnnnnnnnnnnnnnnnnnnnnnnnnnnnnnnnnnnnnnnnnnnnnnnnnnnnnnnnnnnnnnnnnnnnnnnnnnnnnnnnnnnnnnnnnnnnnnnnnnnnnnnnnnnnnnnnnnnnnnnnnnnnnnnnnnnnnnnnnnnnnnnnnnnnnnnnnnnnnnnnnnnnnnnnnnnnnnnnnnnnnnnnnnnnnnnnnnnnnnnnnnnnnnnnnnnnnnnnnnnnnnnnnnnnnnnnnnnnnnnnnnnnnnnnnnnnnnnnnnnnnnnnnnnnnnnnnnnnnnnnnnnnnnnnnnnnnnnnnnnnnnnnnnnnnnnnnnnnnnnnnnnnnnnnnnnnnnnnnnnnnnnnnnnnnnnnnnnnnnnnnnnnnnnnnnnnnnnnnnnnnnnnnnnnnnnnnnnnnnnnnnnnnnnnnnnnnnnnnnnnnnnnnnnnnnnnnnnnnnnnnnnnnnnnnnnnnnnnnnnnnnnnnnnnnnnnnnnnnnnnnnnnnnnnnnnnnnnnnnnnnnnnnnnnnnnnnnnnnnnnnnnnnnnnnnnnnnnnnnnnnnnnnnnnnnnnnnnnnnnnnnnnnnnnnnnnnnnnnnnnnnnnnnnnnnnnnnnnnnnnnnnnnnnnnnnnnnnnnnnnnnnnnnnnnnnnnnnnnnnnnnnnnnnnnnnnnnnnnnnnnnnnnnnnnnnnnnnnnnnnnnnnnnnnnnnnnnnnnnnnnnnnnnnnnnnnnnnnnnnnnnnnnnnnnnnnnnnnnnnnnnnnnnnnnnnnnnnnnnnnnnnnnnnnnnnnnnnnnnnnnnnnnnnnnnnnnnnnnnnnnnnnnnnnnnnnnnnnnnnnnnnnnnnnnnnnnnnnnnnnnnnnnnnnnnnnnnnnnnnnnnnnnnnnnnnnnnnnnnnnnnnnnnnnnnnnnnnnnnnnnnnnnnnnnnnnnnnnnnnnnnnnnnnnnnnnnnnnnnnnnnnnnnnnnnnnnnnnnnnnnnnnnnnnnnnnnnnnnnnnnnnnnnnnnnnnnnnnnnnnnnnnnnnnnnnnnnnnnnnnnnnnnnnnnnnnnnnnnnnnnnnnnnnnnnnnnnnnnnnnnnnnnnnnnnnnnnnnnnnnnnnnnnnnnnnnnnnnnnnnnnnnnnnnnnnnnnnnnnnnnnnnnnnnnnnnnnnnnnnnnnnnnnnnnnnnnnnnnnnnnnnnnnnnnnnnnnnnnnnnnnnnnnnnnnnnnnnnnnnnnnnnnnnnnnnnnnnnnnnnnnnnnnnnnnnnnnnnnnnnnnnnnnnnnnnnnnnnnnnnnnnnnnnnnnnnnnnnnnnnnnnnnnnnnnnnnnnnnnnnnnnnnnnnnnnnnnnnnnnnnnnnnnnnnnnnnnnnnnnnnnnnnnnnnnnnnnnnnnnnnnnnnnnnnnnnnnnnnnnnnnnnnnnnnnnnnnnnnnnnnnnnnnnnnnnnnnnnnnnnnnnnnnnnnnnnnnnnnnnnnnnnnnnnnnnnnnnnnnnnnnnnnnnnnnnnnnnnnnnnnnnnnnnnnnnnnnnnnnnnnnnnnnnnnnnnnnnnnnnnnnnnnnnnnnnnnnnnnnnnnnnnnnnnnnnnnnnnnnnnnnnnnnnnnnnnnnnnnnnnnnnnnnnnnnnnnnnnnnnnnnnnnnnnnnnnnnnnnnnnnnnnnnnnnnnnnnnnnnnnnnnnnnnnnnnnnnnnnnnnnnnnnnnnnnnnnnnnnnnnnnnnnnnnnnnnnnnnnnnnnnnnnnnnnnnnnnnnnnnnnnnnnnnnnnnnnnnnnnnnnnnnnnnnnnnnnnnnnnnnnnnnnnnnnnnnnnnnnnnnnnnnnnnnnnnnnnnnnnnnnnnnnnnnnnnnnnnnnnnnnnnnnnnnnnnnnnnnnnnnnnnnnnnnnnnnnnnnnnnnnnnnnnnnnnnnnnnnnnnnnnnnnnnnnnnnnnnnnnnnnnnnnnnnnnnnnnnnnnnnnnnnnnnnnnnnnnnnnnnnnnnnnnnnnnnnnnnnnnnnnnnnnnnnnnnnnnnnnnnnnnnnnnnnnnnnnnnnnnnnnnnnnnnnnnnnnnnnnnnnnnnnnnnnnnnnnnnnnnnnnnnnnnnnnnnnnnnnnnnnnnnnnnnnnnnnnnnnnnnnnnnnnnnnnnnnnnnnnnnnnnnnnnnnnnnnnnnnnnnnnnnnnnnnnnnnnnnnnnnnnnnnnnnnnnnnnnnnnnnnnnnnnnnnnnnnnnnnnnnnnnnnnnnnnnnnnnnnnnnnnnnnnnnnnnnnnnnnnnnnnnnnnnnnnnnnnnnnnnnnnnnnnnnnnnnnnnnnnnnnnnnnnnnnnnnnnnnnnnnnnnnnnnnnnnnnnnnnnnnnnnnnnnnnnnnnnnnnnnnnnnnnnnnnnnnnnnnnnnnnnnnnnnnnnnnnnnnnnnnnnnnnnnnnnnnnnnnnnnnnnnnnnnnnnnnnnnnnnnnnnnnnnnnnnnnnnnnnnnnnnnnnnnnnnnnnnnnnnnnnnnnnnnnnnnnnnnnnnnnnnnnnnnnnnnnnnnnnnnnnnnnnnnnnnnnnnnnnnnnnnnnnnnnnnnnnnnnnnnnnnnnnnnnnnnnnnnnnnnnnnnnnnnnnnnnnnnnnnnnnnnnnnnnnnnnnnnnnnnnnnnnnnnnnnnnnnnnnnnnnnnnnnnnnnnnnnnnnnnnnnnnnnnnnnnnnnnnnnnnnnnnnnnnnnnnnnnnnnnnnnnnnnnnnnnnnnnnnnnnnnnnnnnnnnnnnnnnnnnnnnnnnnnnnnnnnnnnnnnnnnnnnnnnnnnnnnnnnnnnnnnnnnnnnnnnnnnnnnnnnnnnnnnnnnnnnnnnnnnnnnnnnnnnnnnnnnnnnnnnnnnnnnnnnnnnnnnnnnnnnnnnnnnnnnnnnnnnnnnnnnnnnnnnnnnnnnnnnnnnnnnnnnnnnnnnnnnnnnnnnnnnnnnnnnnnnnnnnnnnnnnnnnnnnnnnnnnnnnnnnnnnnnnnnnnnnnnnnnnnnnnnnnnnnnnnnnnnnnnnnnnnnnnnnnnnnnnnnnnnnnnnnnnnnnnnnnnnnnnnnnnnnnnnnnnnnnnnnnnnnnnnnnnnnnnnnnnnnnnnnnnnnnnnnnnnnnnnnnnnnnnnnnnnnnnnnnnnnnnnnnnnnnnnnnnnnnnnnnnnnnnnnnnnnnnnnnnnnnnnnnnnnnnnnnnnnnnnnnnnnnnnnnnnnnnnnnnnnnnnnnnnnnnnnnnnnnnnnnnnnnnnnnnnnnnnnnnnnnnnnnnnnnnnnnnnnnnnnnnnnnnnnnnnnnnnnnnnnnnnnnnnnnnnnnnnnnnnnnnnnnnnnnnnnnnnnnnnnnnnnnnnnnnnnnnnnnnnnnnnnnnnnnnnnnnnnnnnnnnnnnnnnnnnnnnnnnnnnnnnnnnnnnnnnnnnnnnnnnnnnnnnnnnnnnnnnnnnnnnnnnnnnnnnnnnnnnnnnnnnnnnnnnnnnnnnnnnnnnnnnnnnnnnnnnnnnnnnnnnnnnnnnnnnnnnnnnnnnnnnnnnnnnnnnnnnnnnnnnnnnnnnnnnnnnnnnnnnnnnnnnnnnnnnnnnnnnnnnnnnnnnnnnnnnnnnnnnnnnnnnnnnnnnnnnnnnnnnnnnnnnnnnnnnnnnnnnnnnnnnnnnnnnnnnnnnnnnnnnnnnnnnnnnnnnnnnnnnnnnnnnnnnnnnnnnnnnnnnnnnnnnnnnnnnnnnnnnnnnnnnnnnnnnnnnnnnnnnnnnnnnnnnnnnnnnnnnnnnnnnnnnnnnnnnnnnnnnnnnnnnnnnnnnnnnnnnnnnnnnnnnnnnnnnnnnnnnnnnnnnnnnnnnnnnnnnnnnnnnnnnnnnnnnnnnnnnnnnnnnnnnnnnnnnnnnnnnnnnnnnnnnnnnnnnnnnnnnnnnnnnnnnnnnnnnnnnnnnnnnnnnnnnnnnnnnnnnnnnnnnnnnnnnnnnnnnnnnnnnnnnnnnnnnnnnnnnnnnnnnnnnnnnnnnnnnnnnnnnnnnnnnnnnnnnnnnnnnnnnnnnnnnnnnnnnnnnnnnnnnnnnnnnnnnnnnnnnnnnnnnnnnnnnnnnnnnnnnnnnnnnnnnnnnnnnnnnnnnnnnnnnnnnnnnnnnnnnnnnnnnnnnnnnnnnnnnnnnnnnnnnnnnnnnnnnnnnnnnnnnnnnnnnnnnnnnnnnnnnnnnnnnnnnnnnnnnnnnnnnnnnnnnnnnnnnnnnnnnnnnnnnnnnnnnnnnnnnnnnnnnnnnnnnnnnnnnnnnnnnnnnnnnnnnnnnnnnnnnnnnnnnnnnnnnnnnnnnnnnnnnnnnnnnnnnnnnnnnnnnnnnnnnnnnnnnnnnnnnnnnnnnnnnnnnnnnnnnnnnnnnnnnnnnnnnnnnnnnnnnnnnnnnnnnnnnnnnnnnnnnnnnnnnnnnnnnnnnnnnnnnnnnnnnnnnnnnnnnnnnnnnnnnnnnnnnnnnnnnnnnnnnnnnnnnnnnnnnnnnnnnnnnnnnnnnnnnnnnnnnnnnnnnnnnnnnnnnnnnnnnnnnnnnnnnnnnnnnnnnnnnnnnnnnnnnnnnnnnnnnnnnnnnnnnnnnnnnnnnnnnnnnnnnnnnnnnnnnnnnnnnnnnnnnnnnnnnnnnnnnnnnnnnnnnnnnnnnnnnnnnnnnnnnnnnnnnnnnnnnnnnnnnnnnnnnnnnnnnnnnnnnnnnnnnnnnnnnnnnnnnnnnnnnnnnnnnnnnnnnnnnnnnnnnnnnnnnnnnnnnnnnnnnnnnnnnnnnnnnnnnnnnnnnnnnnnnnnnnnnnnnnnnnnnnnnnnnnnnnnnnnnnnnnnnnnnnnnnnnnnnnnnnnnnnnnnnnnnnnnnnnnnnnnnnnnnnnnnnnnnnnnnnnnnnnnnnnnnnnnnnnnnnnnnnnnnnnnnnnnnnnnnnnnnnnnnnnnnnnnnnnnnnnnnnnnnnnnnnnnnnnnnnnnnnnnnnnnnnnnnnnnnnnnnnnnnnnnnnnnnnnnnnnnnnnnnnnnnnnnnnnnnnnnnnnnnnnnnnnnnnnnnnnnnnnnnnnnnnnnnnnnnnnnnnnnnnnnnnnnnnnnnnnnnnnnnnnnnnnnnnnnnnnnnnnnnnnnnnnnnnnnnnnnnnnnnnnnnnnnnnnnnnnnnnnnnnnnnnnnnnnnnnnnnnnnnnnnnnnnnnnnnnnnnnnnnnnnnnnnnnnnnnnnnnnnnnnnnnnnnnnnnnnnnnnnnnnnnnnnnnnnnnnnnnnnnnnnnnnnnnnnnnnnnnnnnnnnnnnnnnnnnnnnnnnnnnnnnnnnnnnnnnnnnnnnnnnnnnnnnnnnnnnnnnnnnnnnnnnnnnnnnnnnnnnnnnnnnnnnnnnnnnnnnnnnnnnnnnnnnnnnnnnnnnnnnnnnnnnnnnnnnnnnnnnnnnnnnnnnnnnnnnnnnnnnnnnnnnnnnnnnnnnnnnnnnnnnnnnnnnnnnnnnnnnnnnnnnnnnnnnnnnnnnnnnnnnnnnnnnnnnnnnnnnnnnnnnnnnnnnnnnnnnnnnnnnnnnnnnnnnnnnnnnnnnnnnnnnnnnnnnnnnnnnnnnnnnnnnnnnnnnnnnnnnnnnnnnnnnnnnnnnnnnnnnnnnnnnnnnnnnnnnnnnnnnnnnnnnnnnnnnnnnnnnnnnnnnnnnnnnnnnnnnnnnnnnnnnnnnnnnnnnnnnnnnnnnnnnnnnnnnnnnnnnnnnnnnnnnnnnnnnnnnnnnnnnnnnnnnnnnnnnnnnnnnnnnnnnnnnnnnnnnnnnnnnnnnnnnnnnnnnnnnnnnnnnnnnnnnnnnnnnnnnnnnnnnnnnnnnnnnnnnnnnnnnnnnnnnnnnnnnnnnnnnnnnnnnnnnnnnnnnnnnnnnnnnnnnnnnnnnnnnnnnnnnnnnnnnnnnnnnnnnnnnnnnnnnnnnnnnnnnnnnnnnnnnnnnnnnnnnnnnnnnnnnnnnnnnnnnnnnnnnnnnnnnnnnnnnnnnnnnnnnnnnnnnnnnnnnnnnnnnnnnnnnnnnnnnnnnnnnnnnnnnnnnnnnnnnnnnnnnnnnnnnnnnnnnnnnnnnnnnnnnnnnnnnnnnnnnnnnnnnnnnnnnnnnnnnnnnnnnnnnnnnnnnnnnnnnnnnnnnnnnnnnnnnnnnnnnnnnnnnnnnnnnnnnnnnnnnnnnnnnnnnnnnnnnnnnnnnnnnnnnnnnnnnnnnnnnnnnnnnnnnnnnnnnnnnnnnnnnnnnnnnnnnnnnnnnnnnnnnnnnnnnnnnnnnnnnnnnnnnnnnnnnnnnnnnnnnnnnnnnnnnnnnnnnnnnnnnnnnnnnnnnnnnnnnnnnnnnnnnnnnnnnnnnnnnnnnnnnnnnnnnnnnnnnnnnnnnnnnnnnnnnnnnnnnnnnnnnnnnnnnnnnnnnnnnnnnnnnnnnnnnnnnnnnnnnnnnnnnnnnnnnnnnnnnnnnnnnnnnnnnnnnnnnnnnnnnnnnnnnnnnnnnnnnnnnnnnnnnnnnnnnnnnnnnnnnnnnnnnnnnnnnnnnnnnnnnnnnnnnnnnnnnnnnnnnnnnnnnnnnnnnnnnnnnnnnnnnnnnnnnnnnnnnnnnnnnnnnnnnnnnnnnnnnnnnnnnnnnnnnnnnnnnnnnnnnnnnnnnnnnnnnnnnnnnnnnnnnnnnnnnnnnnnnnnnnnnnnnnnnnnnnnnnnnnnnnnnnnnnnnnnnnnnnnnnnnnnnnnnnnnnnnnnnnnnnnnnnnnnnnnnnnnnnnnnnnnnnnnnnnnnnnnnnnnnnnnnnnnnnnnnnnnnnnnnnnnnnnnnnnnnnnnnnnnnnnnnnnnnnnnnnnnnnnnnnnnnnnnnnnnnnnnnnnnnnnnnnnnnnnnnnnnnnnnnnnnnnnnnnnnnnnnnnnnnnnnnnnnnnnnnnnnnnnnnnnnnnnnnnnnnnnnnnnnnnnnnnnnnnnnnnnnnnnnnnnnnnnnnnnnnnnnnnnnnnnnnnnnnnnnnnnnnnnnnnnnnnnnnnnnnnnnnnnnnnnnnnnnnnnnnnnnnnnnnnnnnnnnnnnnnnnnnnnnnnnnnnnnnnnnnnnnnnnnnnnnnnnnnnnnnnnnnnnnnnnnnnnnnnnnnnnnnnnnnnnnnnnnnnnnnnnnnnnnnnnnnnnnnnnnnnnnnnnnnnnnnnnnnnnnnnnnnnnnnnnnnnnnnnnnnnnnnnnnnnnnnnnnnnnnnnnnnnnnnnnnnnnnnnnnnnnnnnnnnnnnnnnnnnnnnnnnnnnnnnnnnnnnnnnnnnnnnnnnnnnnnnnnnnnnnnnnnnnnnnnnnnnnnnnnnnnnnnnnnnnnnnnnnnnnnnnnnnnnnnnnnnnnnnnnnnnnnnnnnnnnnnnnnnnnnnnnnnnnnnnnnnnnnnnnnnnnnnnnnnnnnnnnnnnnnnnnnnnnnnnnnnnnnnnnnnnnnnnnnnnnnnnnnnnnnnnnnnnnnnnnnnnnnnnnnnnnnnnnnnnnnnnnnnnnnnnnnnnnnnnnnnnnnnnnnnnnnnnnnnnnnnnnnnnnnnnnnnnnnnnnnnnnnnnnnnnnnnnnnnnnnnnnnnnnnnnnnnnnnnnnnnnnnnnnnnnnnnnnnnnnnnnnnnnnnnnnnnnnnnnnnnnnnnnnnnnnnnnnnnnnnnnnnnnnnnnnnnnnnnnnnnnnnnnnnnnnnnnnnnnnnnnnnnnnnnnnnnnnnnnnnnnnnnnnnnnnnnnnnnnnnnnnnnnnnnnnnnnnnnnnnnnnnnnnnnnnnnnnnnnnnnnnnnnnnnnnnnnnnnnnnnnnnnnnnnnnnnnnnnnnnnnnnnnnnnnnnnnnnnnnnnnnnnnnnnnnnnnnnnnnnnnnnnnnnnnnnnnnnnnnnnnnnnnnnnnnnnnnnnnnnnnnnnnnnnnnnnnnnnnnnnnnnnnnnnnnnnnnnnnnnnnnnnnnnnnnnnnnnnnnnnnnnnnnnnnnnnnnnnnnnnnnnnnnnnnnnnnnnnnnnnnnnnnnnnnnnnnnnnnnnnnnnnnnnnnnnnnnnnnnnnnnnnnnnnnnnnnnnnnnnnnnnnnnnnnnnnnnnnnnnnnnnnnnnnnnnnnnnnnnnnnnnnnnnnnnnnnnnnnnnnnnnnnnnnnnnnnnnnnnnnnnnnnnnnnnnnnnnnnnnnnnnnnnnnnnnnnnnnnnnnnnnnnnnnnnnnnnnnnnnnnnnnnnnnnnnnnnnnnnnnnnnnnnnnnnnnnnnnnnnnnnnnnnnnnnnnnnnnnnnnnnnnnnnnnnnnnnnnnnnnnnnnnnnnnnnnnnnnnnnnnnnnnnnnnnnnnnnnnnnnnnnnnnnnnnnnnnnnnnnnnnnnnnnnnnnnnnnnnnnnnnnnnnnnnnnnnnnnnnnnnnnnnnnnnnnnnnnnnnnnnnnnnnnnnnnnnnnnnnnnnnnnnnnnnnnnnnnnnnnnnnnnnnnnnnnnnnnnnnnnnnnnnnnnnnnnnnnnnnnnnnnnnnnnnnnnnnnnnnnnnnnnnnnnnnnnnnnnnnnnnnnnnnnnnnnnnnnnnnnnnnnnnnnnnnnnnnnnnnnnnnnnnnnnnnnnnnnnnnnnnnnnnnnnnnnnnnnnnnnnnnnnnnnnnnnnnnnnnnnnnnnnnnnnnnnnnnnnnnnnnnnnnnnnnnnnnnnnnnnnnnnnnnnnnnnnnnnnnnnnnnnnnnnnnnnnnnnnnnnnnnnnnnnnnnnnnnnnnnnnnnnnnnnnnnnnnnnnnnnnnnnnnnnnnnnnnnnnnnnnnnnnnnnnnnnnnnnnnnnnnnnnnnnnnnnnnnnnnnnnnnnnnnnnnnnnnnnnnnnnnnnnnnnnnnnnnnnnnnnnnnnnnnnnnnnnnnnnnnnnnnnnnnnnnnnnnnnnnnnnnnnnnnnnnnnnnnnnnnnnnnnnnnnnnnnnnnnnnnnnnnnnnnnnnnnnnnnnnnnnnnnnnnnnnnnnnnnnnnnnnnnnnnnnnnnnnnnnnnnnnnnnnnnnnnnnnnnnnnnnnnnnnnnnnnnnnnnnnnnnnnnnnnnnnnnnnnnnnnnnnnnnnnnnnnnnnnnnnnnnnnnnnnnnnnnnnnnnnnnnnnnnnnnnnnnnnnnnnnnnnnnnnnnnnnnnnnnnnnnnnnnnnnnnnnnnnnnnnnnnnnnnnnnnnnnnnnnnnnnnnnnnnnnnnnnnnnnnnnnnnnnnnnnnnnnnnnnnnnnnnnnnnnnnnnnnnnnnnnnnnnnnnnnnnnnnnnnnnnnnnnnnnnnnnnnnnnnnnnnnnnnnnnnnnnnnnnnnnnnnnnnnnnnnnnnnnnnnnnnnnnnnnnnnnnnnnnnnnnnnnnnnnnnnnnnnnnnnnnnnnnnnnnnnnnnnnnnnnnnnnnnnnnnnnnnnnnnnnnnnnnnnnnnnnnnnnnnnnnnnnnnnnnnnnnnnnnnnnnnnnnnnnnnnnnnnnnnnnnnnnnnnnnnnnnnnnnnnnnnnnnnnnnnnnnnnnnnnnnnnnnnnnnnnnnnnnnnnnnnnnnnnnnnnnnnnnnnnnnnnnnnnnnnnnnnnnnnnnnnnnnnnnnnnnnnnnnnnnnnnnnnnnnnnnnnnnnnnnnnnnnnnnnnnnnnnnnnnnnnnnnnnnnnnnnnnnnnnnnnnnnnnnnnnnnnnnnnnnnnnnnnnnnnnnnnnnnnnnnnnnnnnnnnnnnnnnnnnnnnnnnnnnnnnnnnnnnnnnnnnnnnnnnnnnnnnnnnnnnnnnnnnnnnnnnnnnnnnnnnnnnnnnnnnnnnnnnnnnnnnnnnnnnnnnnnnnnnnnnnnnnnnnnnnnnnnnnnnnnnnnnnnnnnnnnnnnnnnnnnnnnnnnnnnnnnnnnnnnnnnnnnnnnnnnnnnnnnnnnnnnnnnnnnnnnnnnnnnnnnnnnnnnnnnnnnnnnnnnnnnnnnnnnnnnnnnnnnnnnnnnnnnnnnnnnnnnnnnnnnnnnnnnnnnnnnnnnnnnnnnnnnnnnnnnnnnnnnnnnnnnnnnnnnnnnnnnnnnnnnnnnnnnnnnnnnnnnnnnnnnnnnnnnnnnnnnnnnnnnnnnnnnnnnnnnnnnnnnnnnnnnnnnnnnnnnnnnnnnnnnnnnnnnnnnnnnnnnnnnnnnnnnnnnnnnnnnnnnnnnnnnnnnnnnnnnnnnnnnnnnnnnnnnnnnnnnnnnnnnnnnnnnnnnnnnnnnnnnnnnnnnnnnnnnnnnnnnnnnnnnnnnnnnnnnnnnnnnnnnnnnnnnnnnnnnnnnnnnnnnnnnnnnnnnnnnnnnnnnnnnnnnnnnnnnnnnnnnnnnnnnnnnnnnnnnnnnnnnnnnnnnnnnnnnnnnnnnnnnnnnnnnnnnnnnnnnnnnnnnnnnnnnnnnnnnnnnnnnnnnnnnnnnnnnnnnnnnnnnnnnnnnnnnnnnnnnnnnnnnnnnnnnnnnnnnnnnnnnnnnnnnnnnnnnnnnnnnnnnnnnnnnnnnnnnnnnnnnnnnnnnnnnnnnnnnnnnnnnnnnnnnnnnnnnnnnnnnnnnnnnnnnnnnnnnnnnnnnnnnnnnnnnnnnnnnnnnnnnnnnnnnnnnnnnnnnnnnnnnnnnnnnnnnnnnnnnnnnnnnnnnnnnnnnnnnnnnnnnnnnnnnnnnnnnnnnnnnnnnnnnnnnnnnnnnnnnnnnnnnnnnnnnnnnnnnnnnnnnnnnnnnnnnnnnnnnnnnnnnnnnnnnnnnnnnnnnnnnnnnnnnnnnnnnnnnnnnnnnnnnnnnnnnnnnnnnnnnnnnnnnnnnnnnnnnnnnnnnnnnnnnnnnnnnnnnnnnnnnnnnnnnnnnnnnnnnnnnnnnnnnnnnnnnnnnnnnnnnnnnnnnnnnnnnnnnnnnnnnnnnnnnnnnnnnnnnnnnnnnnnnnnnnnnnnnnnnnnnnnnnnnnnnnnnnnnnnnnnnnnnnnnnnnnnnnnnnnnnnnnnnnnnnnnnnnnnnnnnnnnnnnnnnnnnnnnnnnnnnnnnnnnnnnnnnnnnnnnnnnnnnnnnnnnnnnnnnnnnnnnnnnnnnnnnnnnnnnnnnnnnnnnnnnnnnnnnnnnnnnnnnnnnnnnnnnnnnnnnnnnnnnnnnnnnnnnnnnnnnnnnnnnnnnnnnnnnnnnnnnnnnnnnnnnnnnnnnnnnnnnnnnnnnnnnnnnnnnnnnnnnnnnnnnnnnnnnnnnnnnnnnnnnnnnnnnnnnnnnnnnnnnnnnnnnnnnnnnnnnnnnnnnnnnnnnnnnnnnnnnnnnnnnnnnnnnnnnnnnnnnnnnnnnnnnnnnnnnnnnnnnnnnnnnnnnnnnnnnnnnnnnnnnnnnnnnnnnnnnnnnnnnnnnnnnnnnnnnnnnnnnnnnnnnnnnnnnnnnnnnnnnnnnnnnnnnnnnnnnnnnnnnnnnnnnnnnnnnnnnnnnnnnnnnnnnnnnnnnnnnnnnnnnnnnnnnnnnnnnnnnnnnnnnnnnnnnnnnnnnnnnnnnnnnnnnnnnnnnnnnnnnnnnnnnnnnnnnnnnnnnnnnnnnnnnnnnnnnnnnnnnnnnnnnnnnnnnnnnnnnnnnnnnnnnnnnnnnnnnnnnnnnnnnnnnnnnnnnnnnnnnnnnnnnnnnnnnnnnnnnnnnnnnnnnnnnnnnnnnnnnnnnnnnnnnnnnnnnnnnnnnnnnnnnnnnnnnnnnnnnnnnnnnnnnnnnnnnnnnnnnnnnnnnnnnnnnnnnnnnnnnnnnnnnnnnnnnnnnnnnnnnnnnnnnnnnnnnnnnnnnnnnnnnnnnnnnnnnnnnnnnnnnnnnnnnnnnnnnnnnnnnnnnnnnnnnnnnnnnnnnnnnnnnnnnnnnnnnnnnnnnnnnnnnnnnnnnnnnnnnnnnnnnnnnnnnnnnnnnnnnnnnnnnnnnnnnnnnnnnnnnnnnnnnnnnnnnnnnnnnnnnnnnnnnnnnnnnnnnnnnnnnnnnnnnnnnnnnnnnnnnnnnnnnnnnnnnnnnnnnnnnnnnnnnnnnnnnnnnnnnnnnnnnnnnnnnnnnnnnnnnnnnnnnnnnnnnnnnnnnnnnnnnnnnnnnnnnnnnnnnnnnnnnnnnnnnnnnnnnnnnnnnnnnnnnnnnnnnnnnnnnnnnnnnnnnnnnnnnnnnnnnnnnnnnnnnnnnnnnnnnnnnnnnnnnnnnnnnnnnnnnnnnnnnnnnnnnnnnnnnnnnnnnnnnnnnnnnnnnnnnnnnnnnnnnnnnnnnnnnnnnnnnnnnnnnnnnnnnnnnnnnnnnnnnnnnnnnnnnnnnnnnnnnnnnnnnnnnnnnnnnnnnnnnnnnnnnnnnnnnnnnnnnnnnnnnnnnnnnnnnnnnnnnnnnnnnnnnnnnnnnnnnnnnnnnnnnnnnnnnnnnnnnnnnnnnnnnnnnnnnnnnnnnnnnnnnnnnnnnnnnnnnnnnnnnnnnnnnnnnnnnnnnnnnnnnnnnnnnnnnnnnnnnnnnnnnnnnnnnnnnnnnnnnnnnnnnnnnnnnnnnnnnnnnnnnnnnnnnnnnnnnnnnnnnnnnnnnnnnnnnnnnnnnnnnnnnnnnnnnnnnnnnnnnnnnnnnnnnnnnnnnnnnnnnnnnnnnnnnnnnnnnnnnnnnnnnnnnnnnnnnnnnnnnnnnnnnnnnnnnnnnnnnnnnnnnnnnnnnnnnnnnnnnnnnnnnnnnnnnnnnnnnnnnnnnnnnnnnnnnnnnnnnnnnnnnnnnnnnnnnnnnnnnnnnnnnnnnnnnnnnnnnnnnnnnnnnnnnnnnnnnnnnnnnnnnnnnnnnnnnnnnnnnnnnnnnnnnnnnnnnnnnnnnnnnnnnnnnnnnnnnnnnnnnnnnnnnnnnnnnnnnnnnnnnnnnnnnnnnnnnnnnnnnnnnnnnnnnnnnnnnnnnnnnnnnnnnnnnnnnnnnnnnnnnnnnnnnnnnnnnnnnnnnnnnnnnnnnnnnnnnnnnnnnnnnnnnnnnnnnnnnnnnnnnnnnnnnnnnnnnnnnnnnnnnnnnnnnnnnnnnnnnnnnnnnnnnnnnnnnnnnnnnnnnnnnnnnnnnnnnnnnnnnnnnnnnnnnnnnnnnnnnnnnnnnnnnnnnnnnnnnnnnnnnnnnnnnnnnnnnnnnnnnnnnnnnnnnnnnnnnnnnnnnnnnnnnnnnnnnnnnnnnnnnnnnnnnnnnnnnnnnnnnnnnnnnnnnnnnnnnnnnnnnnnnnnnnnnnnnnnnnnnnnnnnnnnnnnnnnnnnnnnnnnnnnnnnnnnnnnnnnnnnnnnnnnnnnnnnnnnnnnnnnnnnnnnnnnnnnnnnnnnnnnnnnnnnnnnnnnnnnnnnnnnnnnnnnnnnnnnnnnnnnnnnnnnnnnnnnnnnnnnnnnnnnnnnnnnnnnnnnnnnnnnnnnnnnnnnnnnnnnnnnnnnnnnnnnnnnnnnnnnnnnnnnnnnnnnnnnnnnnnnnnnnnnnnnnnnnnnnnnnnnnnnnnnnnnnnnnnnnnnnnnnnnnnnnnnnnnnnnnnnnnnnnnnnnnnnnnnnnnnnnnnnnnnnnnnnnnnnnnnnnnnnnnnnnnnnnnnnnnnnnnnnnnnnnnnnnnnnnnnnnnnnnnnnnnnnnnnnnnnnnnnnnnnnnnnnnnnnnnnnnnnnnnnnnnnnnnnnnnnnnnnnnnnnnnnnnnnnnnnnnnnnnnnnnnnnnnnnnnnnnnnnnnnnnnnnnnnnnnnnnnnnnnnnnnnnnnnnnnnnnnnnnnnnnnnnnnnnnnnnnnnnnnnnnnnnnnnnnnnnnnnnnnnnnnnnnnnnnnnnnnnnnnnnnnnnnnnnnnnnnnnnnnnnnnnnnnnnnnnnnnnnnnnnnnnnnnnnnnnnnnnnnnnnnnnnnnnnnnnnnnnnnnnnnnnnnnnnnnnnnnnnnnnnnnnnnnnnnnnnnnnnnnnnnnnnnnnnnnnnnnnnnnnnnnnnnnnnnnnnnnnnnnnnnnnnnnnnnnnnnnnnnnnnnnnnnnnnnnnnnnnnnnnnnnnnnnnnnnnnnnnnnnnnnnnnnnnnnnnnnnnnnnnnnnnnnnnnnnnnnnnnnnnnnnnnnnnnnnnnnnnnnnnnnnnnnnnnnnnnnnnnnnnnnnnnnnnnnnnnnnnnnnnnnnnnnnnnnnnnnnnnnnnnnnnnnnnnnnnnnnnnnnnnnnnnnnnnnnnnnnnnnnnnnnnnnnnnnnnnnnnnnnnnnnnnnnnnnnnnnnnnnnnnnnnnnnnnnnnnnnnnnnnnnnnnnnnnnnnnnnnnnnnnnnnnnnnnnnnnnnnnnnnnnnnnnnnnnnnnnnnnnnnnnnnnnnnnnnnnnnnnnnnnnnnnnnnnnnnnnnnnnnnnnnnnnnnnnnnnnnnnnnnnnnnnnnnnnnnnnnnnnnnnnnnnnnnnnnnnnnnnnnnnnnnnnnnnnnnnnnnnnnnnnnnnnnnnnnnnnnnnnnnnnnnnnnnnnnnnnnnnnnnnnnnnnnnnnnnnnnnnnnnnnnnnnnnnnnnnnnnnnnnnnnnnnnnnnnnnnnnnnnnnnnnnnnnnnnnnnnnnnnnnnnnnnnnnnnnnnnnnnnnnnnnnnnnnnnnnnnnnnnnnnnnnnnnnnnnnnnnnnnnnnnnnnnnnnnnnnnnnnnnnnnnnnnnnnnnnnnnnnnnnnnnnnnnnnnnnnnnnnnnnnnnnnnnnnnnnnnnnnnnnnnnnnnnnnnnnnnnnnnnnnnnnnnnnnnnnnnnnnnnnnnnnnnnnnnnnnnnnnnnnnnnnnnnnnnnnnnnnnnnnnnnnnnnnnnnnnnnnnnnnnnnnnnnnnnnnnnnnnnnnnnnnnnnnnnnnnnnnnnnnnnnnnnnnnnnnnnnnnnnnnnnnnnnnnnnnnnnnnnnnnnnnnnnnnnnnnnnnnnnnnnnnnnnnnnnnnnnnnnnnnnnnnnnnnnnnnnnnnnnnnnnnnnnnnnnnnnnnnnnnnnnnnnnnnnnnnnnnnnnnnnnnnnnnnnnnnnnnnnnnnnnnnnnnnnnnnnnnnnnnnnnnnnnnnnnnnnnnnnnnnnnnnnnnnnnnnnnnnnnnnnnnnnnnnnnnnnnnnnnnnnnnnnnnnnnnnnnnnnnnnnnnnnnnnnnnnnnnnnnnnnnnnnnnnnnnnnnnnnnnnnnnnnnnnnnnnnnnnnnnnnnnnnnnnnnnnnnnnnnnnnnnnnnnnnnnnnnnnnnnnnnnnnnnnnnnnnnnnnnnnnnnnnnnnnnnnnnnnnnnnnnnnnnnnnnnnnnnnnnnnnnnnnnnnnnnnnnnnnnnnnnnnnnnnnnnnnnnnnnnnnnnnnnnnnnnnnnnnnnnnnnnnnnnnnnnnnnnnnnnnnnnnnnnnnnnnnnnnnnnnnnnnnnnnnnnnnnnnnnnnnnnnnnnnnnnnnnnnnnnnnnnnnnnnnnnnnnnnnnnnnnnnnnnnnnnnnnnnnnnnnnnnnnnnnnnnnnnnnnnnnnnnnnnnnnnnnnnnnnnnnnnnnnnnnnnnnnnnnnnnnnnnnnnnnnnnnnnnnnnnnnnnnnnnnnnnnnnnnnnnnnnnnnnnnnnnnnnnnnnnnnnnnnnnnnnnnnnnnnnnnnnnnnnnnnnnnnnnnnnnnnnnnnnnnnnnnnnnnnnnnnnnnnnnnnnnnnnnnnnnnnnnnnnnnnnnnnnnnnnnnnnnnnnnnnnnnnnnnnnnnnnnnnnnnnnnnnnnnnnnnnnnnnnnnnnnnnnnnnnnnnnnnnnnnnnnnnnnnnnnnnnnnnnnnnnnnnnnnnnnnnnnnnnnnnnnnnnnnnnnnnnnnnnnnnnnnnnnnnnnnnnnnnnnnnnnnnnnnnnnnnnnnnnnnnnnnnnnnnnnnnnnnnnnnnnnnnnnnnnnnnnnnnnnnnnnnnnnnnnnnnnnnnnnnnnnnnnnnnnnnnnnnnnnnnnnnnnnnnnnnnnnnnnnnnnnnnnnnnnnnnnnnnnnnnnnnnnnnnnnnnnnnnnnnnnnnnnnnnnnnnnnnnnnnnnnnnnnnnnnnnnnnnnnnnnnnnnnnnnnnnnnnnnnnnnnnnnnnnnnnnnnnnnnnnnnnnnnnnnnnnnnnnnnnnnnnnnnnnnnnnnnnnnnnnnnnnnnnnnnnnnnnnnnnnnnnnnnnnnnnnnnnnnnnnnnnnnnnnnnnnnnnnnnnnnnnnnnnnnnnnnnnnnnnnnnnnnnnnnnnnnnnnnnnnnnnnnnnnnnnnnnnnnnnnnnnnnnnnnnnnnnnnnnnnnnnnnnnnnnnnnnnnnnnnnnnnnnnnnnnnnnnnnnnnnnnnnnnnnnnnnnnnnnnnnnnnnnnnnnnnnnnnnnnnnnnnnnnnnnnnnnnnnnnnnnnnnnnnnnnnnnnnnnnnnnnnnnnnnnnnnnnnnnnnnnnnnnnnnnnnnnnnnnnnnnnnnnnnnnnnnnnnnnnnnnnnnnnnnnnnnnnnnnnnnnnnnnnnnnnnnnnnnnnnnnnnnnnnnnnnnnnnnnnnnnnnnnnnnnnnnnnnnnnnnnnnnnnnnnnnnnnnnnnnnnnnnnnnnnnnnnnnnnnnnnnnnnnnnnnnnnnnnnnnnnnnnnnnnnnnnnnnnnnnnnnnnnnnnnnnnnnnnnnnnnnnnnnnnnnnnnnnnnnnnnnnnnnnnnnnnnnnnnnnnnnnnnnnnnnnnnnnnnnnnnnnnnnnnnnnnnnnnnnnnnnnnnnnnnnnnnnnnnnnnnnnnnnnnnnnnnnnnnnnnnnnnnnnnnnnnnnnnnnnnnnnnnnnnnnnnnnnnnnnnnnnnnnnnnnnnnnnnnnnnnnnnnnnnnnnnnnnnnnnnnnnnnnnnnnnnnnnnnnnnnnnnnnnnnnnnnnnnnnnnnnnnnnnnnnnnnnnnnnnnnnnnnnnnnnnnnnnnnnnnnnnnnnnnnnnnnnnnnnnnnnnnnnnnnnnnnnnnnnnnnnnnnnnnnnnnnnnnnnnnnnnnnnnnnnnnnnnnnnnnnnnnnnnnnnnnnnnnnnnnnnnnnnnnnnnnnnnnnnnnnnnnnnnnnnnnnnnnnnnnnnnnnnnnnnnnnnnnnnnnnnnnnnnnnnnnnnnnnnnnnnnnnnnnnnnnnnnnnnnnnnnnnnnnnnnnnnnnnnnnnnnnnnnnnnnnnnnnnnnnnnnnnnnnnnnnnnnnnnnnnnnnnnnnnnnnnnnnnnnnnnnnnnnnnnnnnnnnnnnnnnnnnnnnnnnnnnnnnnnnnnnnnnnnnnnnnnnnnnnnnnnnnnnnnnnnnnnnnnnnnnnnnnnnnnnnnnnnnnnnnnnnnnnnnnnnnnnnnnnnnnnnnnnnnnnnnnnnnnnnnnnnnnnnnnnnnnnnnnnnnnnnnnnnnnnnnnnnnnnnnnnnnnnnnnnnnnnnnnnnnnnnnnnnnnnnnnnnnnnnnnnnnnnnnnnnnnnnnnnnnnnnnnnnnnnnnnnnnnnnnnnnnnnnnnnnnnnnnnnnnnnnnnnnnnnnnnnnnnnnnnnnnnnnnnnnnnnnnnnnnnnnnnnnnnnnnnnnnnnnnnnnnnnnnnnnnnnnnnnnnnnnnnnnnnnnnnnnnnnnnnnnnnnnnnnnnnnnnnnnnnnnnnnnnnnnnnnnnnnnnnnnnnnnnnnnnnnnnnnnnnnnnnnnnnnnnnnnnnnnnnnnnnnnnnnnnnnnnnnnnnnnnnnnnnnnnnnnnnnnnnnnnnnnnnnnnnnnnnnnnnnnnnnnnnnnnnnnnnnnnnnnnnnnnnnnnnnnnnnnnnnnnnnnnnnnnnnnnnnnnnnnnnnnnnnnnnnnnnnnnnnnnnnnnnnnnnnnnnnnnnnnnnnnnnnnnnnnnnnnnnnnnnnnnnnnnnnnnnnnnnnnnnnnnnnnnnnnnnnnnnnnnnnnnnnnnnnnnnnnnnnnnnnnnnnnnnnnnnnnnnnnnnnnnnnnnnnnnnnnnnnnnnnnnnnnnnnnnnnnnnnnnnnnnnnnnnnnnnnnnnnnnnnnnnnnnnnnnnnnnnnnnnnnnnnnnnnnnnnnnnnnnnnnnnnnnnnnnnnnnnnnnnnnnnnnnnnnnnnnnnnnnnnnnnnnnnnnnnnnnnnnnnnnnnnnnnnnnnnnnnnnnnnnnnnnnnnnnnnnnnnnnnnnnnnnnnnnnnnnnnnnnnnnnnnnnnnnnnnnnnnnnnnnnnnnnnnnnnnnnnnnnnnnnnnnnnnnnnnnnnnnnnnnnnnnnnnnnnnnnnnnnnnnnnnnnnnnnnnnnnnnnnnnnnnnnnnnnnnnnnnnnnnnnnnnnnnnnnnnnnnnnnnnnnnnnnnnnnnnnnnnnnnnnnnnnnnnnnnnnnnnnnnnnnnnnnnnnnnnnnnnnnnnnnnnnnnnnnnnnnnnnnnnnnnnnnnnnnnnnnnnnnnnnnnnnnnnnnnnnnnnnnnnnnnnnnnnnnnnnnnnnnnnnnnnnnnnnnnnnnnnnnnnnnnnnnnnnnnnnnnnnnnnnnnnnnnnnnnnnnnnnnnnnnnnnnnnnnnnnnnnnnnnnnnnnnnnnnnnnnnnnnnnnnnnnnnnnnnnnnnnnnnnnnnnnnnnnnnnnnnnnnnnnnnnnnnnnnnnnnnnnnnnnnnnnnnnnnnnnnnnnnnnnnnnnnnnnnnnnnnnnnnnnnnnnnnnnnnnnnnnnnnnnnnnnnnnnnnnnnnnnnnnnnnnnnnnnnnnnnnnnnnnnnnnnnnnnnnnnnnnnnnnnnnnnnnnnnnnnnnnnnnnnnnnnnnnnnnnnnnnnnnnnnnnnnnnnnnnnnnnnnnnnnnnnnnnnnnnnnnnnnnnnnnnnnnnnnnnnnnnnnnnnnnnnnnnnnnnnnnnnnnnnnnnnnnnnnnnnnnnnnnnnnnnnnnnnnnnnnnnnnnnnnnnnnnnnnnnnnnnnnnnnnnnnnnnnnnnnnnnnnnnnnnnnnnnnnnnnnnnnnnnnnnnnnnnnnnnnnnnnnnnnnnnnnnnnnnnnnnnnnnnnnnnnnnnnnnnnnnnnnnnnnnnnnnnnnnnnnnnnnnnnnnnnnnnnnnnnnnnnnnnnnnnnnnnnnnnnnnnnnnnnnnnnnnnnnnnnnnnnnnnnnnnnnnnnnnnnnnnnnnnnnnnnnnnnnnnnnnnnnnnnnnnnnnnnnnnnnnnnnnnnnnnnnnnnnnnnnnnnnnnnnnnnnnnnnnnnnnnnnnnnnnnnnnnnnnnnnnnnnnnnnnnnnnnnnnnnnnnnnnnnnnnnnnnnnnnnnnnnnnnnnnnnnnnnnnnnnnnnnnnnnnnnnnnnnnnnnnnnnnnnnnnnnnnnnnnnnnnnnnnnnnnnnnnnnnnnnnnnnnnnnnnnnnnnnnnnnnnnnnnnnnnnnnnnnnnnnnnnnnnnnnnnnnnnnnnnnnnnnnnnnnnnnnnnnnnnnnnnnnnnnnnnnnnnnnnnnnnnnnnnnnnnnnnnnnnnnnnnnnnnnnnnnnnnnnnnnnnnnnnnnnnnnnnnnnnnnnnnnnnnnnnnnnnnnnnnnnnnnnnnnnnnnnnnnnnnnnnnnnnnnnnnnnnnnnnnnnnnnnnnnnnnnnnnnnnnnnnnnnnnnnnnnnnnnnnnnnnnnnnnnnnnnnnnnnnnnnnnnnnnnnnnnnnnnnnnnnnnnnnnnnnnnnnnnnnnnnnnnnnnnnnnnnnnnnnnnnnnnnnnnnnnnnnnnnnnnnnnnnnnnnnnnnnnnnnnnnnnnnnnnnnnnnnnnnnnnnnnnnnnnnnnnnnnnnnnnnnnnnnnnnnnnnnnnnnnnnnnnnnnnnnnnnnnnnnnnnnnnnnnnnnnnnnnnnnnnnnnnnnnnnnnnnnnnnnnnnnnnnnnnnnnnnnnnnnnnnnnnnnnnnnnnnnnnnnnnnnnnnnnnnnnnnnnnnnnnnnnnnnnnnnnnnnnnnnnnnnnnnnnnnnnnnnnnnnnnnnnnnnnnnnnnnnnnnnnnnnnnnnnnnnnnnnnnnnnnnnnnnnnnnnnnnnnnnnnnnnnnnnnnnnnnnnnnnnnnnnnnnnnnnnnnnnnnnnnnnnnnnnnnnnnnnnnnnnnnnnnnnnnnnnnnnnnnnnnnnnnnnnnnnnnnnnnnnnnnnnnnnnnnnnnnnnnnnnnnnnnnnnnnnnnnnnnnnnnnnnnnnnnnnnnnnnnnnnnnnnnnnnnnnnnnnnnnnnnnnnnnnnnnnnnnnnnnnnnnnnnnnnnnnnnnnnnnnnnnnnnnnnnnnnnnnnnnnnnnnnnnnnnnnnnnnnnnnnnnnnnnnnnnnnnnnnnnnnnnnnnnnnnnnnnnnnnnnnnnnnnnnnnnnnnnnnnnnnnnnnnnnnnnnnnnnnnnnnnnnnnnnnnnnnnnnnnnnnnnnnnnnnnnnnnnnnnnnnnnnnnnnnnnnnnnnnnnnnnnnnnnnnnnnnnnnnnnnnnnnnnnnnnnnnnnnnnnnnnnnnnnnnnnnnnnnnnnnnnnnnnnnnnnnnnnnnnnnnnnnnnnnnnnnnnnnnnnnnnnnnnnnnnnnnnnnnnnnnnnnnnnnnnnnnnnnnnnnnnnnnnnnnnnnnnnnnnnnnnnnnnnnnnnnnnnnnnnnnnnnnnnnnnnnnnnnnnnnnnnnnnnnnnnnnnnnnnnnnnnnnnnnnnnnnnnnnnnnnnnnnnnnnnnnnnnnnnnnnnnnnnnnnnnnnnnnnnnnnnnnnnnnnnnnnnnnnnnnnnnnnnnnnnnnnnnnnnnnnnnnnnnnnnnnnnnnnnnnnnnnnnnnnnnnnnnnnnnnnnnnnnnnnnnnnnnnnnnnnnnnnnnnnnnnnnnnnnnnnnnnnnnnnnnnnnnnnnnnnnnnnnnnnnnnnnnnnnnnnnnnnnnnnnnnnnnnnnnnnnnnnnnnnnnnnnnnnnnnnnnnnnnnnnnnnnnnnnnnnnnnnnnnnnnnnnnnnnnnnnnnnnnnnnnnnnnnnnnnnnnnnnnnnnnnnnnnnnnnnnnnnnnnnnnnnnnnnnnnnnnnnnnnnnnnnnnnnnnnnnnnnnnnnnnnnnnnnnnnnnnnnnnnnnnnnnnnnnnnnnnnnnnnnnnnnnnnnnnnnnnnnnnnnnnnnnnnnnnnnnnnnnnnnnnnnnnnnnnnnnnnnnnnnnnnnnnnnnnnnnnnnnnnnnnnnnnnnnnnnnnnnnnnnnnnnnnnnnnnnnnnnnnnnnnnnnnnnnnnnnnnnnnnnnnnnnnnnnnnnnnnnnnnnnnnnnnnnnnnnnnnnnnnnnnnnnnnnnnnnnnnnnnnnnnnnnnnnnnnnnnnnnnnnnnnnnnnnnnnnnnnnnnnnnnnnnnnnnnnnnnnnnnnnnnnnnnnnnnnnnnnnnnnnnnnnnnnnnnnnnnnnnnnnnnnnnnnnnnnnnnnnnnnnnnnnnnnnnnnnnnnnnnnnnnnnnnnnnnnnnnnnnnnnnnnnnnnnnnnnnnnnnnnnnnnnnnnnnnnnnnnnnnnnnnnnnnnnnnnnnnnnnnnnnnnnnnnnnnnnnnnnnnnnnnnnnnnnnnnnnnnnnnnnnnnnnnnnnnnnnnnnnnnnnnnnnnnnnnnnnnnnnnnnnnnnnnnnnnnnnnnnnnnnnnnnnnnnnnnnnnnnnnnnnnnnnnnnnnnnnnnnnnnnnnnnnnnnnnnnnnnnnnnnnnnnnnnnnnnnnnnnnnnnnnnnnnnnnnnnnnnnnnnnnnnnnnnnnnnnnnnnnnnnnnnnnnnnnnnnnnnnnnnnnnnnnnnnnnnnnnnnnnnnnnnnnnnnnnnnnnnnnnnnnnnnnnnnnnnnnnnnnnnnnnnnnnnnnnnnnnnnnnnnnnnnnnnnnnnnnnnnnnnnnnnnnnnnnnnnnnnnnnnnnnnnnnnnnnnnnnnnnnnnnnnnnnnnnnnnnnnnnnnnnnnnnnnnnnnnnnnnnnnnnnnnnnnnnnnnnnnnnnnnnnnnnnnnnnnnnnnnnnnnnnnnnnnnnnnnnnnnnnnnnnnnnnnnnnnnnnnnnnnnnnnnnnnnnnnnnnnnnnnnnnnnnnnnnnnnnnnnnnnnnnnnnnnnnnnnnnnnnnnnnnnnnnnnnnnnnnnnnnnnnnnnnnnnnnnnnnnnnnnnnnnnnnnnnnnnnnnnnnnnnnnnnnnnnnnnnnnnnnnnnnnnnnnnnnnnnnnnnnnnnnnnnnnnnnnnnnnnnnnnnnnnnnnnnnnnnnnnnnnnnnnnnnnnnnnnnnnnnnnnnnnnnnnnnnnnnnnnnnnnnnnnnnnnnnnnnnnnnnnnnnnnnnnnnnnnnnnnnnnnnnnnnnnnnnnnnnnnnnnnnnnnnnnnnnnnnnnnnnnnnnnnnnnnnnnnnnnnnnnnnnnnnnnnnnnnnnnnnnnnnnnnnnnnnnnnnnnnnnnnnnnnnnnnnnnnnnnnnnnnnnnnnnnnnnnnnnnnnnnnnnnnnnnnnnnnnnnnnnnnnnnnnnnnnnnnnnnnnnnnnnnnnnnnnnnnnnnnnnnnnnnnnnnnnnnnnnnnnnnnnnnnnnnnnnnnnnnnnnnnnnnnnnnnnnnnnnnnnnnnnnnnnnnnnnnnnnnnnnnnnnnnnnnnnnnnnnnnnnnnnnnnnnnnnnnnnnnnnnnnnnnnnnnnnnnnnnnnnnnnnnnnnnnnnnnnnnnnnnnnnnnnnnnnnnnnnnnnnnnnnnnnnnnnnnnnnnnnnnnnnnnnnnnnnnnnnnnnnnnnnnnnnnnnnnnnnnnnnnnnnnnnnnnnnnnnnnnnnnnnnnnnnnnnnnnnnnnnnnnnnnnnnnnnnnnnnnnnnnnnnnnnnnnnnnnnnnnnnnnnnnnnnnnnnnnnnnnnnnnnnnnnnnnnnnnnnnnnnnnnnnnnnnnnnnnnnnnnnnnnnnnnnnnnnnnnnnnnnnnnnnnnnnnnnnnnnnnnnnnnnnnnnnnnnnnnnnnnnnnnnnnnnnnnnnnnnnnnnnnnnnnnnnnnnnnnnnnnnnnnnnnnnnnnnnnnnnnnnnnnnnnnnnnnnnnnnnnnnnnnnnnnnnnnnnnnnnnnnnnnnnnnnnnnnnnnnnnnnnnnnnnnnnnnnnnnnnnnnnnnnnnnnnnnnnnnnnnnnnnnnnnnnnnnnnnnnnnnnnnnnnnnnnnnnnnnnnnnnnnnnnnnnnnnnnnnnnnnnnnnnnnnnnnnnnnnnnnnnnnnnnnnnnnnnnnnnnnnnnnnnnnnnnnnnnnnnnnnnnnnnnnnnnnnnnnnnnnnnnnnnnnnnnnnnnnnnnnnnnnnnnnnnnnnnnnnnnnnnnnnnnnnnnnnnnnnnnnnnnnnnnnnnnnnnnnnnnnnnnnnnnnnnnnnnnnnnnnnnnnnnnnnnnnnnnnnnnnnnnnnnnnnnnnnnnnnnnnnnnnnnnnnnnnnnnnnnnnnnnnnnnnnnnnnnnnnnnnnnnnnnnnnnnnnnnnnnnnnnnnnnnnnnnnnnnnnnnnnnnnnnnnnnnnnnnnnnnnnnnnnnnnnnnnnnnnnnnnnnnnnnnnnnnnnnnnnnnnnnnnnnnnnnnnnnnnnnnnnnnnnnnnnnnnnnnnnnnnnnnnnnnnnnnnnnnnnnnnnnnnnnnnnnnnnnnnnnnnnnnnnnnnnnnnnnnnnnnnnnnnnnnnnnnnnnnnnnnnnnnnnnnnnnnnnnnnnnnnnnnnnnnnnnnnnnnnnnnnnnnnnnnnnnnnnnnnnnnnnnnnnnnnnnnnnnnnnnnnnnnnnnnnnnnnnnnnnnnnnnnnnnnnnnnnnnnnnnnnnnnnnnnnnnnnnnnnnnnnnnnnnnnnnnnnnnnnnnnnnnnnnnnnnnnnnnnnnnnnnnnnnnnnnnnnnnnnnnnnnnnnnnnnnnnnnnnnnnnnnnnnnnnnnnnnnnnnnnnnnnnnnnnnnnnnnnnnnnnnnnnnnnnnnnnnnnnnnnnnnnnnnnnnnnnnnnnnnnnnnnnnnnnnnnnnnnnnnnnnnnnnnnnnnnnnnnnnnnnnnnnnnnnnnnnnnnnnnnnnnnnnnnnnnnnnnnnnnnnnnnnnnnnnnnnnnnnnnnnnnnnnnnnnnnnnnnnnnnnnnnnnnnnnnnnnnnnnnnnnnnnnnnnnnnnnnnnnnnnnnnnnnnnnnnnnnnnnnnnnnnnnnnnnnnnnnnnnnnnnnnnnnnnnnnnnnnnnnnnnnnnnnnnnnnnnnnnnnnnnnnnnnnnnnnnnnnnnnnnnnnnnnnnnnnnnnnnnnnnnnnnnnnnnnnnnnnnnnnnnnnnnnnnnnnnnnnnnnnnnnnnnnnnnnnnnnnnnnnnnnnnnnnnnnnnnnnnnnnnnnnnnnnnnnnnnnnnnnnnnnnnnnnnnnnnnnnnnnnnnnnnnnnnnnnnnnnnnnnnnnnnnnnnnnnnnnnnnnnnnnnnnnnnnnnnnnnnnnnnnnnnnnnnnnnnnnnnnnnnnnnnnnnnnnnnnnnnnnnnnnnnnnnnnnnnnnnnnnnnnnnnnnnnnnnnnnnnnnnnnnnnnnnnnnnnnnnnnnnnnnnnnnnnnnnnnnnnnnnnnnnnnnnnnnnnnnnnnnnnnnnnnnnnnnnnnnnnnnnnnnnnnnnnnnnnnnnnnnnnnnnnnnnnnnnnnnnnnnnnnnnnnnnnnnnnnnnnnnnnnnnnnnnnnnnnnnnnnnnnnnnnnnnnnnnnnnnnnnnnnnnnnnnnnnnnnnnnnnnnnnnnnnnnnnnnnnnnnnnnnnnnnnnnnnnnnnnnnnnnnnnnnnnnnnnnnnnnnnnnnnnnnnnnnnnnnnnnnnnnnnnnnnnnnnnnnnnnnnnnnnnnnnnnnnnnnnnnnnnnnnnnnnnnnnnnnnnnnnnnnnnnnnnnnnnnnnnnnnnnnnnnnnnnnnnnnnnnnnnnnnnnnnnnnnnnnnnnnnnnnnnnnnnnnnnnnnnnnnnnnnnnnnnnnnnnnnnnnnnnnnnnnnnnnnnnnnnnnnnnnnnnnnnnnnnnnnnnnnnnnnnnnnnnnnnnnnnnnnnnnnnnnnnnnnnnnnnnnnnnnnnnnnnnnnnnnnnnnnnnnnnnnnnnnnnnnnnnnnnnnnnnnnnnnnnnnnnnnnnnnnnnnnnnnnnnnnnnnnnnnnnnnnnnnnnnnnnnnnnnnnnnnnnnnnnnnnnnnnnnnnnnnnnnnnnnnnnnnnnnnnnnnnnnnnnnnnnnnnnnnnnnnnnnnnnnnnnnnnnnnnnnnnnnnnnnnnnnnnnnnnnnnnnnnnnnnnnnnnnnnnnnnnnnnnnnnnnnnnnnnnnnnnnnnnnnnnnnnnnnnnnnnnnnnnnnnnnnnnnnnnnnnnnnnnnnnnnnnnnnnnnnnnnnnnnnnnnnnnnnnnnnnnnnnnnnnnnnnnnnnnnnnnnnnnnnnnnnnnnnnnnnnnnnnnnnnnnnnnnnnnnnnnnnnnnnnnnnnnnnnnnnnnnnnnnnnnnnnnnnnnnnnnnnnnnnnnnnnnnnnnnnnnnnnnnnnnnnnnnnnnnnnnnnnnnnnnnnnnnnnnnnnnnnnnnnnnnnnnnnnnnnnnnnnnnnnnnnnnnnnnnnnnnnnnnnnnnnnnnnnnnnnnnnnnnnnnnnnnnnnnnnnnnnnnnnnnnnnnnnnnnnnnnnnnnnnnnnnnnnnnnnnnnnnnnnnnnnnnnnnnnnnnnnnnnnnnnnnnnnnnnnnnnnnnnnnnnnnnnnnnnnnnnnnnnnnnnnnnnnnnnnnnnnnnnnnnnnnnnnnnnnnnnnnnnnnnnnnnnnnnnnnnnnnnnnnnnnnnnnnnnnnnnnnnnnnnnnnnnnnnnnnnnnnnnnnnnnnnnnnnnnnnnnnnnnnnnnnnnnnnnnnnnnnnnnnnnnnnnnnnnnnnnnnnnnnnnnnnnnnnnnnnnnnnnnnnnnnnnnnnnnnnnnnnnnnnnnnnnnnnnnnnnnnnnnnnnnnnnnnnnnnnnnnnnnnnnnnnnnnnnnnnnnnnnnnnnnnnnnnnnnnnnnnnnnnnnnnnnnnnnnnnnnnnnnnnnnnnnnnnnnnnnnnnnnnnnnnnnnnnnnnnnnnnnnnnnnnnnnnnnnnnnnnnnnnnnnnnnnnnnnnnnnnnnnnnnnnnnnnnnnnnnnnnnnnnnnnnnnnnnnnnnnnnnnnnnnnnnnnnnnnnnnnnnnnnnnnnnnnnnnnnnnnnnnnnnnnnnnnnnnnnnnnnnnnnnnnnnnnnnnnnnnnnnnnnnnnnnnnnnnnnnnnnnnnnnnnnnnnnnnnnnnnnnnnnnnnnnnnnnnnnnnnnnnnnnnnnnnnnnnnnnnnnnnnnnnnnnnnnnnnnnnnnnnnnnnnnnnnnnnnnnnnnnnnnnnnnnnnnnnnnnnnnnnnnnnnnnnnnnnnnnnnnnnnnnnnnnnnnnnnnnnnnnnnnnnnnnnnnnnnnnnnnnnnnnnnnnnnnnnnnnnnnnnnnnnnnnnnnnnnnnnnnnnnnnnnnnnnnnnnnnnnnnnnnnnnnnnnnnnnnnnnnnnnnnnnnnnnnnnnnnnnnnnnnnnnnnnnnnnnnnnnnnnnnnnnnnnnnnnnnnnnnnnnnnnnnnnnnnnnnnnnnnnnnnnnnnnnnnnnnnnnnnnnnnnnnnnnnnnnnnnnnnnnnnnnnnnnnnnnnnnnnnnnnnnnnnnnnnnnnnnnnnnnnnnnnnnnnnnnnnnnnnnnnnnnnnnnnnnnnnnnnnnnnnnnnnnnnnnnnnnnnnnnnnnnnnnnnnnnnnnnnnnnnnnnnnnnnnnnnnnnnnnnnnnnnnnnnnnnnnnnnnnnnnnnnnnnnnnnnnnnnnnnnnnnnnnnnnnnnnnnnnnnnnnnnnnnnnnnnnnnnnnnnnnnnnnnnnnnnnnnnnnnnnnnnnnnnnnnnnnnnnnnnnnnnnnnnnnnnnnnnnnnnnnnnnnnnnnnnnnnnnnnnnnnnnnnnnnnnnnnnnnnnnnnnnnnnnnnnnnnnnnnnnnnnnnnnnnnnnnnnnnnnnnnnnnnnnnnnnnnnnnnnnnnnnnnnnnnnnnnnnnnnnnnnnnnnnnnnnnnnnnnnnnnnnnnnnnnnnnnnnnnnnnnnnnnnnnnnnnnnnnnnnnnnnnnnnnnnnnnnnnnnnnnnnnnnnnnnnnnnnnnnnnnnnnnnnnnnnnnnnnnnnnnnnnnnnnnnnnnnnnnnnnnnnnnnnnnnnnnnnnnnnnnnnnnnnnnnnnnnnnnnnnnnnnnnnnnnnnnnnnnnnnnnnnnnnnnnnnnnnnnnnnnnnnnnnnnnnnnnnnnnnnnnnnnnnnnnnnnnnnnnnnnnnnnnnnnnnnnnnnnnnnnnnnnnnnnnnnnnnnnnnnnnnnnnnnnnnnnnnnnnnnnnnnnnnnnnnnnnnnnnnnnnnnnnnnnnnnnnnnnnnnnnnnnnnnnnnnnnnnnnnnnnnnnnnnnnnnnnnnnnnnnnnnnnnnnnnnnnnnnnnnnnnnnnnnnnnnnnnnnnnnnnnnnnnnnnnnnnnnnnnnnnnnnnnnnnnnnnnnnnnnnnnnnnnnnnnnnnnnnnnnnnnnnnnnnnnnnnnnnnnnnnnnnnnnnnnnnnnnnnnnnnnnnnnnnnnnnnnnnnnnnnnnnnnnnnnnnnnnnnnnnnnnnnnnnnnnnnnnnnnnnnnnnnnnnnnnnnnnnnnnnnnnnnnnnnnnnnnnnnnnnnnnnnnnnnnnnnnnnnnnnnnnnnnnnnnnnnnnnnnnnnnnnnnnnnnnnnnnnnnnnnnnnnnnnnnnnnnnnnnnnnnnnnnnnnnnnnnnnnnnnnnnnnnnnnnnnnnnnnnnnnnnnnnnnnnnnnnnnnnnnnnnnnnnnnnnnnnnnnnnnnnnnnnnnnnnnnnnnnnnnnnnnnnnnnnnnnnnnnnnnnnnnnnnnnnnnnnnnnnnnnnnnnnnnnnnnnnnnnnnnnnnnnnnnnnnnnnnnnnnnnnnnnnnnnnnnnnnnnnnnnnnnnnnnnnnnnnnnnnnnnnnnnnnnnnnnnnnnnnnnnnnnnnnnnnnnnnnnnnnnnnnnnnnnnnnnnnnnnnnnnnnnnnnnnnnnnnnnnnnnnnnnnnnnnnnnnnnnnnnnnnnnnnnnnnnnnnnnnnnnnnnnnnnnnnnnnnnnnnnnnnnnnnnnnnnnnnnnnnnnnnnnnnnnnnnnnnnnnnnnnnnnnnnnnnnnnnnnnnnnnnnnnnnnnnnnnnnnnnnnnnnnnnnnnnnnnnnnnnnnnnnnnnnnnnnnnnnnnnnnnnnnnnnnnnnnnnnnnnnnnnnnnnnnnnnnnnnnnnnnnnnnnnnnnnnnnnnnnnnnnnnnnnnnnnnnnnnnnnnnnnnnnnnnnnnnnnnnnnnnnnnnnnnnnnnnnnnnnnnnnnnnnnnnnnnnnnnnnnnnnnnnnnnnnnnnnnnnnnnnnnnnnnnnnnnnnnnnnnnnnnnnnnnnnnnnnnnnnnnnnnnnnnnnnnnnnnnnnnnnnnnnnnnnnnnnnnnnnnnnnnnnnnnnnnnnnnnnnnnnnnnnnnnnnnnnnnnnnnnnnnnnnnnnnnnnnnnnnnnnnnnnnnnnnnnnnnnnnnnnnnnnnnnnnnnnnnnnnnnnnnnnnnnnnnnnnnnnnnnnnnnnnnnnnnnnnnnnnnnnnnnnnnnnnnnnnnnnnnnnnnnnnnnnnnnnnnnnnnnnnnnnnnnnnnnnnnnnnnnnnnnnnnnnnnnnnnnnnnnnnnnnnnnnnnnnnnnnnnnnnnnnnnnnnnnnnnnnnnnnnnnnnnnnnnnnnnnnnnnnnnnnnnnnnnnnnnnnnnnnnnnnnnnnnnnnnnnnnnnnnnnnnnnnnnnnnnnnnnnnnnnnnnnnnnnnnnnnnnnnnnnnnnnnnnnnnnnnnnnnnnnnnnnnnnnnnnnnnnnnnnnnnnnnnnnnnnnnnnnnnnnnnnnnnnnnnnnnnnnnnnnnnnnnnnnnnnnnnnnnnnnnnnnnnnnnnnnnnnnnnnnnnnnnnnnnnnnnnnnnnnnnnnnnnnnnnnnnnnnnnnnnnnnnnnnnnnnnnnnnnnnnnnnnnnnnnnnnnnnnnnnnnnnnnnnnnnnnnnnnnnnnnnnnnnnnnnnnnnnnnnnnnnnnnnnnnnnnnnnnnnnnnnnnnnnnnnnnnnnnnnnnnnnnnnnnnnnnnnnnnnnnnnnnnnnnnnnnnnnnnnnnnnnnnnnnnnnnnnnnnnnnnnnnnnnnnnnnnnnnnnnnnnnnnnnnnnnnnnnnnnnnnnnnnnnnnnnnnnnnnnnnnnnnnnnnnnnnnnnnnnnnnnnnnnnnnnnnnnnnnnnnnnnnnnnnnnnnnnnnnnnnnnnnnnnnnnnnnnnnnnnnnnnnnnnnnnnnnnnnnnnnnnnnnnnnnnnnnnnnnnnnnnnnnnnnnnnnnnnnnnnnnnnnnnnnnnnnnnnnnnnnnnnnnnnnnnnnnnnnnnnnnnnnnnnnnnnnnnnnnnnnnnnnnnnnnnnnnnnnnnnnnnnnnnnnnnnnnnnnnnnnnnnnnnnnnnnnnnnnnnnnnnnnnnnnnnnnnnnnnnnnnnnnnnnnnnnnnnnnnnnnnnnnnnnnnnnnnnnnnnnnnnnnnnnnnnnnnnnnnnnnnnnnnnnnnnnnnnnnnnnnnnnnnnnnnnnnnnnnnnnnnnnnnnnnnnnnnnnnnnnnnnnnnnnnnnnnnnnnnnnnnnnnnnnnnnnnnnnnnnnnnnnnnnnnnnnnnnnnnnnnnnnnnnnnnnnnnnnnnnnnnnnnnnnnnnnnnnnnnnnnnnnnnnnnnnnnnnnnnnnnnnnnnnnnnnnnnnnnnnnnnnnnnnnnnnnnnnnnnnnnnnnnnnnnnnnnnnnnnnnnnnnnnnnnnnnnnnnnnnnnnnnnnnnnnnnnnnnnnnnnnnnnnnnnnnnnnnnnnnnnnnnnnnnnnnnnnnnnnnnnnnnnnnnnnnnnnnnnnnnnnnnnnnnnnnnnnnnnnnnnnnnnnnnnnnnnnnnnnnnnnnnnnnnnnnnnnnnnnnnnnnnnnnnnnnnnnnnnnnnnnnnnnnnnnnnnnnnnnnnnnnnnnnnnnnnnnnnnnnnnnnnnnnnnnnnnnnnnnnnnnnnnnnnnnnnnnnnnnnnnnnnnnnnnnnnnnnnnnnnnnnnnnnnnnnnnnnnnnnnnnnnnnnnnnnnnnnnnnnnnnnnnnnnnnnnnnnnnnnnnnnnnnnnnnnnnnnnnnnnnnnnnnnnnnnnnnnnnnnnnnnnnnnnnnnnnnnnnnnnnnnnnnnnnnnnnnnnnnnnnnnnnnnnnnnnnnnnnnnnnnnnnnnnnnnnnnnnnnnnnnnnnnnnnnnnnnnnnnnnnnnnnnnnnnnnnnnnnnnnnnnnnnnnnnnnnnnnnnnnnnnnnnnnnnnnnnnnnnnnnnnnnnnnnnnnnnnnnnnnnnnnnnnnnnnnnnnnnnnnnnnnnnnnnnnnnnnnnnnnnnnnnnnnnnnnnnnnnnnnnnnnnnnnnnnnnnnnnnnnnnnnnnnnnnnnnnnnnnnnnnnnnnnnnnnnnnnnnnnnnnnnnnnnnnnnnnnnnnnnnnnnnnnnnnnnnnnnnnnnnnnnnnnnnnnnnnnnnnnnnnnnnnnnnnnnnnnnnnnnnnnnnnnnnnnnnnnnnnnnnnnnnnnnnnnnnnnnnnnnnnnnnnnnnnnnnnnnnnnnnnnnnnnnnnnnnnnnnnnnnnnnnnnnnnnnnnnnnnnnnnnnnnnnnnnnnnnnnnnnnnnnnnnnnnnnnnnnnnnnnnnnnnnnnnnnnnnnnnnnnnnnnnnnnnnnnnnnnnnnnnnnnnnnnnnnnnnnnnnnnnnnnnnnnnnnnnnnnnnnnnnnnnnnnnnnnnnnnnnnnnnnnnnnnnnnnnnnnnnnnnnnnnnnnnnnnnnnnnnnnnnnnnnnnnnnnnnnnnnnnnnnnnnnnnnnnnnnnnnnnnnnnnnnnnnnnnnnnnnnnnnnnnnnnnnnnnnnnnnnnnnnnnnnnnnnnnnnnnnnnnnnnnnnnnnnnnnnnnnnnnnnnnnnnnnnnnnnnnnnnnnnnnnnnnnnnnnnnnnnnnnnnnnnnnnnnnnnnnnnnnnnnnnnnnnnnnnnnnnnnnnnnnnnnnnnnnnnnnnnnnnnnnnnnnnnnnnnnnnnnnnnnnnnnnnnnnnnnnnnnnnnnnnnnnnnnnnnnnnnnnnnnnnnnnnnnnnnnnnnnnnnnnnnnnnnnnnnnnnnnnnnnnnnnnnnnnnnnnnnnnnnnnnnnnnnnnnnnnnnnnnnnnnnnnnnnnnnnnnnnnnnnnnnnnnnnnnnnnnnnnnnnnnnnnnnnnnnnnnnnnnnnnnnnnnnnnnnnnnnnnnnnnnnnnnnnnnnnnnnnnnnnnnnnnnnnnnnnnnnnnnnnnnnnnnnnnnnnnnnnnnnnnnnnnnnnnnnnnnnnnnnnnnnnnnnnnnnnnnnnnnnnnnnnnnnnnnnnnnnnnnnnnnnnnnnnnnnnnnnnnnnnnnnnnnnnnnnnnnnnnnnnnnnnnnnnnnnnnnnnnnnnnnnnnnnnnnnnnnnnnnnnnnnnnnnnnnnnnnnnnnnnnnnnnnnnnnnnnnnnnnnnnnnnnnnnnnnnnnnnnnnnnnnnnnnnnnnnnnnnnnnnnnnnnnnnnnnnnnnnnnnnnnnnnnnnnnnnnnnnnnnnnnnnnnnnnnnnnnnnnnnnnnnnnnnnnnnnnnnnnnnnnnnnnnnnnnnnnnnnnnnnnnnnnnnnnnnnnnnnnnnnnnnnnnnnnnnnnnnnnnnnnnnnnnnnnnnnnnnnnnnnnnnnnnnnnnnnnnnnnnnnnnnnnnnnnnnnnnnnnnnnnnnnnnnnnnnnnnnnnnnnnnnnnnnnnnnnnnnnnnnnnnnnnnnnnnnnnnnnnnnnnnnnnnnnnnnnnnnnnnnnnnnnnnnnnnnnnnnnnnnnnnnnnnnnnnnnnnnnnnnnnnnnnnnnnnnnnnnnnnnnnnnnnnnnnnnnnnnnnnnnnnnnnnnnnnnnnnnnnnnnnnnnnnnnnnnnnnnnnnnnnnnnnnnnnnnnnnnnnnnnnnnnnnnnnnnnnnnnnnnnnnnnnnnnnnnnnnnnnnnnnnnnnnnnnnnnnnnnnnnnnnnnnnnnnnnnnnnnnnnnnnnnnnnnnnnnnnnnnnnnnnnnnnnnnnnnnnnnnnnnnnnnnnnnnnnnnnnnnnnnnnnnnnnnnnnnnnnnnnnnnnnnnnnnnnnnnnnnnnnnnnnnnnnnnnnnnnnnnnnnnnnnnnnnnnnnnnnnnnnnnnnnnnnnnnnnnnnnnnnnnnnnnnnnnnnnnnnnnnnnnnnnnnnnnnnnnnnnnnnnnnnnnnnnnnnnnnnnnnnnnnnnnnnnnnnnnnnnnnnnnnnnnnnnnnnnnnnnnnnnnnnnnnnnnnnnnnnnnnnnnnnnnnnnnnnnnnnnnnnnnnnnnnnnnnnnnnnnnnnnnnnnnnnnnnnnnnnnnnnnnnnnnnnnnnnnnnnnnnnnnnnnnnnnnnnnnnnnnnnnnnnnnnnnnnnnnnnnnnnnnnnnnnnnnnnnnnnnnnnnnnnnnnnnnnnnnnnnnnnnnnnnnnnnnnnnnnnnnnnnnnnnnnnnnnnnnnnnnnnnnnnnnnnnnnnnnnnnnnnnnnnnnnnnnnnnnnnnnnnnnnnnnnnnnnnnnnnnnnnnnnnnnnnnnnnnnnnnnnnnnnnnnnnnnnnnnnnnnnnnnnnnnnnnnnnnnnnnnnnnnnnnnnnnnnnnnnnnnnnnnnnnnnnnnnnnnnnnnnnnnnnnnnnnnnnnnnnnnnnnnnnnnnnnnnnnnnnnnnnnnnnnnnnnnnnnnnnnnnnnnnnnnnnnnnnnnnnnnnnnnnnnnnnnnnnnnnnnnnnnnnnnnnnnnnnnnnnnnnnnnnnnnnnnnnnnnnnnnnnnnnnnnnnnnnnnnnnnnnnnnnnnnnnnnnnnnnnnnnnnnnnnnnnnnnnnnnnnnnnnnnnnnnnnnnnnnnnnnnnnnnnnnnnnnnnnnnnnnnnnnnnnnnnnnnnnnnnnnnnnnnnnnnnnnnnnnnnnnnnnnnnnnnnnnnnnnnnnnnnnnnnnnnnnnnnnnnnnnnnnnnnnnnnnnnnnnnnnnnnnnnnnnnnnnnnnnnnnnnnnnnnnnnnnnnnnnnnnnnnnnnnnnnnnnnnnnnnnnnnnnnnnnnnnnnnnnnnnnnnnnnnnnnnnnnnnnnnnnnnnnnnnnnnnnnnnnnnnnnnnnnnnnnnnnnnnnnnnnnnnnnnnnnnnnnnnnnnnnnnnnnnnnnnnnnnnnnnnnnnnnnnnnnnnnnnnnnnnnnnnnnnnnnnnnnnnnnnnnnnnnnnnnnnnnnnnnnnnnnnnnnnnnnnnnnnnnnnnnnnnnnnnnnnnnnnnnnnnnnnnnnnnnnnnnnnnnnnnnnnnnnnnnnnnnnnnnnnnnnnnnnnnnnnnnnnnnnnnnnnnnnnnnnnnnnnnnnnnnnnnnnnnnnnnnnnnnnnnnnnnnnnnnnnnnnnnnnnnnnnnnnnnnnnnnnnnnnnnnnnnnnnnnnnnnnnnnnnnnnnnnnnnnnnnnnnnnnnnnnnnnnnnnnnnnnnnnnnnnnnnnnnnnnnnnnnnnnnnnnnnnnnnnnnnnnnnnnnnnnnnnnnnnnnnnnnnnnnnnnnnnnnnnnnnnnnnnnnnnnnnnnnnnnnnnnnnnnnnnnnnnnnnnnnnnnnnnnnnnnnnnnnnnnnnnnnnnnnnnnnnnnnnnnnnnnnnnnnnnnnnnnnnnnnnnnnnnnnnnnnnnnnnnnnnnnnnnnnnnnnnnnnnnnnnnnnnnnnnnnnnnnnnnnnnnnnnnnnnnnnnnnnnnnnnnnnnnnnnnnnnnnnnnnnnnnnnnnnnnnnnnnnnnnnnnnnnnnnnnnnnnnnnnnnnnnnnnnnnnnnnnnnnnnnnnnnnnnnnnnnnnnnnnnnnnnnnnnnnnnnnnnnnnnnnnnnnnnnnnnnnnnnnnnnnnnnnnnnnnnnnnnnnnnnnnnnnnnnnnnnnnnnnnnnnnnnnnnnnnnnnnnnnnnnnnnnnnnnnnnnnnnnnnnnnnnnnnnnnnnnnnnnnnnnnnnnnnnnnnnnnnnnnnnnnnnnnnnnnnnnnnnnnnnnnnnnnnnnnnnnnnnnnnnnnnnnnnnnnnnnnnnnnnnnnnnnnnnnnnnnnnnnnnnnnnnnnnnnnnnnnnnnnnnnnnnnnnnnnnnnnnnnnnnnnnnnnnnnnnnnnnnnnnnnnnnnnnnnnnnnnnnnnnnnnnnnnnnnnnnnnnnnnnnnnnnnnnnnnnnnnnnnnnnnnnnnnnnnnnnnnnnnnnnnnnnnnnnnnnnnnnnnnnnnnnnnnnnnnnnnnnnnnnnnnnnnnnnnnnnnnnnnnnnnnnnnnnnnnnnnnnnnnnnnnnnnnnnnnnnnnnnnnnnnnnnnnnnnnnnnnnnnnnnnnnnnnnnnnnnnnnnnnnnnnnnnnnnnnnnnnnnnnnnnnnnnnnnnnnnnnnnnnnnnnnnnnnnnnnnnnnnnnnnnnnnnnnnnnnnnnnnnnnnnnnnnnnnnnnnnnnnnnnnnnnnnnnnnnnnnnnnnnnnnnnnnnnnnnnnnnnnnnnnnnnnnnnnnnnnnnnnnnnnnnnnnnnnnnnnnnnnnnnnnnnnnnnnnnnnnnnnnnnnnnnnnnnnnnnnnnnnnnnnnnnnnnnnnnnnnnnnnnnnnnnnnnnnnnnnnnnnnnnnnnnnnnnnnnnnnnnnnnnnnnnnnnnnnnnnnnnnnnnnnnnnnnnnnnnnnnnnnnnnnnnnnnnnnnnnnnnnnnnnnnnnnnnnnnnnnnnnnnnnnnnnnnnnnnnnnnnnnnnnnnnnnnnnnnnnnnnnnnnnnnnnnnnnnnnnnnnnnnnnnnnnnnnnnnnnnnnnnnnnnnnnnnnnnnnnnnnnnnnnnnnnnnnnnnnnnnnnnnnnnnnnnnnnnnnnnnnnnnnnnnnnnnnnnnnnnnnnnnnnnnnnnnnnnnnnnnnnnnnnnnnnnnnnnnnnnnnnnnnnnnnnnnnnnnnnnnnnnnnnnnnnnnnnnnnnnnnnnnnnnnnnnnnnnnnnnnnnnnnnnnnnnnnnnnnnnnnnnnnnnnnnnnnnnnnnnnnnnnnnnnnnnnnnnnnnnnnnnnnnnnnnnnnnnnnnnnnnnnnnnnnnnnnnnnnnnnnnnnnnnnnnnnnnnnnnnnnnnnnnnnnnnnnnnnnnnnnnnnnnnnnnnnnnnnnnnnnnnnnnnnnnnnnnnnnnnnnnnnnnnnnnnnnnnnnnnnnnnnnnnnnnnnnnnnnnnnnnnnnnnnnnnnnnnnnnnnnnnnnnnnnnnnnnnnnnnnnnnnnnnnnnnnnnnnnnnnnnnnnnnnnnnnnnnnnnnnnnnnnnnnnnnnnnnnnnnnnnnnnnnnnnnnnnnnnnnnnnnnnnnnnnnnnnnnnnnnnnnnnnnnnnnnnnnnnnnnnnnnnnnnnnnnnnnnnnnnnnnnnnnnnnnnnnnnnnnnnnnnnnnnnnnnnnnnnnnnnnnnnnnnnnnnnnnnnnnnnnnnnnnnnnnnnnnnnnnnnnnnnnnnnnnnnnnnnnnnnnnnnnnnnnnnnnnnnnnnnnnnnnnnnnnnnnnnnnnnnnnnnnnnnnnnnnnnnnnnnnnnnnnnnnnnnnnnnnnnnnnnnnnnnnnnnnnnnnnnnnnnnnnnnnnnnnnnnnnnnnnnnnnnnnnnnnnnnnnnnnnnnnnnnnnnnnnnnnnnnnnnnnnnnnnnnnnnnnnnnnnnnnnnnnnnnnnnnnnnnnnnnnnnnnnnnnnnnnnnnnnnnnnnnnnnnnnnnnnnnnnnnnnnnnnnnnnnnnnnnnnnnnnnnnnnnnnnnnnnnnnnnnnnnnnnnnnnnnnnnnnnnnnnnnnnnnnnnnnnnnnnnnnnnnnnnnnnnnnnnnnnnnnnnnnnnnnnnnnnnnnnnnnnnnnnnnnnnnnnnnnnnnnnnnnnnnnnnnnnnnnnnnnnnnnnnnnnnnnnnnnnnnnnnnnnnnnnnnnnnnnnnnnnnnnnnnnnnnnnnnnnnnnnnnnnnnnnnnnnnnnnnnnnnnnnnnnnnnnnnnnnnnnnnnnnnnnnnnnnnnnnnnnnnnnnnnnnnnnnnnnnnnnnnnnnnnnnnnnnnnnnnnnnnnnnnnnnnnnnnnnnnnnnnnnnnnnnnnnnnnnnnnnnnnnnnnnnnnnnnnnnnnnnnnnnnnnnnnnnnnnnnnnnnnnnnnnnnnnnnnnnnnnnnnnnnnnnnnnnnnnnnnnnnnnnnnnnnnnnnnnnnnnnnnnnnnnnnnnnnnnnnnnnnnnnnnnnnnnnnnnnnnnnnnnnnnnnnnnnnnnnnnnnnnnnnnnnnnnnnnnnnnnnnnnnnnnnnnnnnnnnnnnnnnnnnnnnnnnnnnnnnnnnnnnnnnnnnnnnnnnnnnnnnnnnnnnnnnnnnnnnnnnnnnnnnnnnnnnnnnnnnnnnnnnnnnnnnnnnnnnnnnnnnnnnnnnnnnnnnnnnnnnnnnnnnnnnnnnnnnnnnnnnnnnnnnnnnnnnnnnnnnnnnnnnnnnnnnnnnnnnnnnnnnnnnnnnnnnnnnnnnnnnnnnnnnnnnnnnnnnnnnnnnnnnnnnnnnnnnnnnnnnnnnnnnnnnnnnnnnnnnnnnnnnnnnnnnnnnnnnnnnnnnnnnnnnnnnnnnnnnnnnnnnnnnnnnnnnnnnnnnnnnnnnnnnnnnnnnnnnnnnnnnnnnnnnnnnnnnnnnnnnnnnnnnnnnnnnnnnnnnnnnnnnnnnnnnnnnnnnnnnnnnnnnnnnnnnnnnnnnnnnnnnnnnnnnnnnnnnnnnnnnnnnnnnnnnnnnnnnnnnnnnnnnnnnnnnnnnnnnnnnnnnnnnnnnnnnnnnnnnnnnnnnnnnnnnnnnnnnnnnnnnnnnnnnnnnnnnnnnnnnnnnnnnnnnnnnnnnnnnnnnnnnnnnnnnnnnnnnnnnnnnnnnnnnnnnnnnnnnnnnnnnnnnnnnnnnnnnnnnnnnnnnnnnnnnnnnnnnnnnnnnnnnnnnnnnnnnnnnnnnnnnnnnnnnnnnnnnnnnnnnnnnnnnnnnnnnnnnnnnnnnnnnnnnnnnnnnnnnnnnnnnnnnnnnnnnnnnnnnnnnnnnnnnnnnnnnnnnnnnnnnnnnnnnnnnnnnnnnnnnnnnnnnnnnnnnnnnnnnnnnnnnnnnnnnnnnnnnnnnnnnnnnnnnnnnnnnnnnnnnnnnnnnnnnnnnnnnnnnnnnnnnnnnnnnnnnnnnnnnnnnnnnnnnnnnnnnnnnnnnnnnnnnnnnnnnnnnnnnnnnnnnnnnnnnnnnnnnnnnnnnnnnnnnnnnnnnnnnnnnnnnnnnnnnnnnnnnnnnnnnnnnnnnnnnnnnnnnnnnnnnnnnnnnnnnnnnnnnnnnnnnnnnnnnnnnnnnnnnnnnnnnnnnnnnnnnnnnnnnnnnnnnnnnnnnnnnnnnnnnnnnnnnnnnnnnnnnnnnnnnnnnnnnnnnnnnnnnnnnnnnnnnnnnnnnnnnnnnnnnnnnnnnnnnnnnnnnnnnnnnnnnnnnnnnnnnnnnnnnnnnnnnnnnnnnnnnnnnnnnnnnnnnnnnnnnnnnnnnnnnnnnnnnnnnnnnnnnnnnnnnnnnnnnnnnnnnnnnnnnnnnnnnnnnnnnnnnnnnnnnnnnnnnnnnnnnnnnnnnnnnnnnnnnnnnnnnnnnnnnnnnnnnnnnnnnnnnnnnnnnnnnnnnnnnnnnnnnnnnnnnnnnnnnnnnnnnnnnnnnnnnnnnnnnnnnnnnnnnnnnnnnnnnnnnnnnnnnnnnnnnnnnnnnnnnnnnnnnnnnnnnnnnnnnnnnnnnnnnnnnnnnnnnnnnnnnnnnnnnnnnnnnnnnnnnnnnnnnnnnnnnnnnnnnnnnnnnnnnnnnnnnnnnnnnnnnnnnnnnnnnnnnnnnnnnnnnnnnnnnnnnnnnnnnnnnnnnnnnnnnnnnnnnnnnnnnnnnnnnnnnnnnnnnnnnnnnnnnnnnnnnnnnnnnnnnnnnnnnnnnnnnnnnnnnnnnnnnnnnnnnnnnnnnnnnnnnnnnnnnnnnnnnnnnnnnnnnnnnnnnnnnnnnnnnnnnnnnnnnnnnnnnnnnnnnnnnnnnnnnnnnnnnnnnnnnnnnnnnnnnnnnnnnnnnnnnnnnnnnnnnnnnnnnnnnnnnnnnnnnnnnnnnnnnnnnnnnnnnnnnnnnnnnnnnnnnnnnnnnnnnnnnnnnnnnnnnnnnnnnnnnnnnnnnnnnnnnnnnnnnnnnnnnnnnnnnnnnnnnnnnnnnnnnnnnnnnnnnnnnnnnnnnnnnnnnnnnnnnnnnnnnnnnnnnnnnnnnnnnnnnnnnnnnnnnnnnnnnnnnnnnnnnnnnnnnnnnnnnnnnnnnnnnnnnnnnnnnnnnnnnnnnnnnnnnnnnnnnnnnnnnnnnnnnnnnnnnnnnnnnnnnnnnnnnnnnnnnnnnnnnnnnnnnnnnnnnnnnnnnnnnnnnnnnnnnnnnnnnnnnnnnnnnnnnnnnnnnnnnnnnnnnnnnnnnnnnnnnnnnnnnnnnnnnnnnnnnnnnnnnnnnnnnnnnnnnnnnnnnnnnnnnnnnnnnnnnnnnnnnnnnnnnnnnnnnnnnnnnnnnnnnnnnnnnnnnnnnnnnnnnnnnnnnnnnnnnnnnnnnnnnnnnnnnnnnnnnnnnnnnnnnnnnnnnnnnnnnnnnnnnnnnnnnnnnnnnnnnnnnnnnnnnnnnnnnnnnnnnnnnnnnnnnnnnnnnnnnnnnnnnnnnnnnnnnnnnnnnnnnnnnnnnnnnnnnnnnnnnnnnnnnnnnnnnnnnnnnnnnnnnnnnnnnnnnnnnnnnnnnnnnnnnnnnnnnnnnnnnnnnnnnnnnnnnnnnnnnnnnnnnnnnnnnnnnnnnnnnnnnnnnnnnnnnnnnnnnnnnnnnnnnnnnnnnnnnnnnnnnnnnnnnnnnnnnnnnnnnnnnnnnnnnnnnnnnnnnnnnnnnnnnnnnnnnnnnnnnnnnnnnnnnnnnnnnnnnnnnnnnnnnnnnnnnnnnnnnnnnnnnnnnnnnnnnnnnnnnnnnnnnnnnnnnnnnnnnnnnnnnnnnnnnnnnnnnnnnnnnnnnnnnnnnnnnnnnnnnnnnnnnnnnnnnnnnnnnnnnnnnnnnnnnnnnnnnnnnnnnnnnnnnnnnnnnnnnnnnnnnnnnnnnnnnnnnnnnnnnnnnnnnnnnnnnnnnnnnnnnnnnnnnnnnnnnnnnnnnnnnnnnnnnnnnnnnnnnnnnnnnnnnnnnnnnnnnnnnnnnnnnnnnnnnnnnnnnnnnnnnnnnnnnnnnnnnnnnnnnnnnnnnnnnnnnnnnnnnnnnnnnnnnnnnnnnnnnnnnnnnnnnnnnnnnnnnnnnnnnnnnnnnnnnnnnnnnnnnnnnnnnnnnnnnnnnnnnnnnnnnnnnnnnnnnnnnnnnnnnnnnnnnnnnnnnnnnnnnnnnnnnnnnnnnnnnnnnnnnnnnnnnnnnnnnnnnnnnnnnnnnnnnnnnnnnnnnnnnnnnnnnnnnnnnnnnnnnnnnnnnnnnnnnnnnnnnnnnnnnnnnnnnnnnnnnnnnnnnnnnnnnnnnnnnnnnnnnnnnnnnnnnnnnnnnnnnnnnnnnnnnnnnnnnnnnnnnnnnnnnnnnnnnnnnnnnnnnnnnnnnnnnnnnnnnnnnnnnnnnnnnnnnnnnnnnnnnnnnnnnnnnnnnnnnnnnnnnnnnnnnnnnnnnnnnnnnnnnnnnnnnnnnnnnnnnnnnnnnnnnnnnnnnnnnnnnnnnnnnnnnnnnnnnnnnnnnnnnnnnnnnnnnnnnnnnnnnnnnnnnnnnnnnnnnnnnnnnnnnnnnnnnnnnnnnnnnnnnnnnnnnnnnnnnnnnnnnnnnnnnnnnnnnnnnnnnnnnnnnnnnnnnnnnnnnnnnnnnnnnnnnnnnnnnnnnnnnnnnnnnnnnnnnnnnnnnnnnnnnnnnnnnnnnnnnnnnnnnnnnnnnnnnnnnnnnnnnnnnnnnnnnnnnnnnnnnnnnnnnnnnnnnnnnnnnnnnnnnnnnnnnnnnnnnnnnnnnnnnnnnnnnnnnnnnnnnnnnnnnnnnnnnnnnnnnnnnnnnnnnnnnnnnnnnnnnnnnnnnnnnnnnnnnnnnnnnnnnnnnnnnnnnnnnnnnnnnnnnnnnnnnnnnnnnnnnnnnnnnnnnnnnnnnnnnnnnnnnnnnnnnnnnnnnnnnnnnnnnnnnnnnnnnnnnnnnnnnnnnnnnnnnnnnnnnnnnnnnnnnnnnnnnnnnnnnnnnnnnnnnnnnnnnnnnnnnnnnnnnnnnnnnnnnnnnnnnnnnnnnnnnnnnnnnnnnnnnnnnnnnnnnnnnnnnnnnnnnnnnnnnnnnnnnnnnnnnnnnnnnnnnnnnnnnnnnnnnnnnnnnnnnnnnnnnnnnnnnnnnnnnnnnnnnnnnnnnnnnnnnnnnnnnnnnnnnnnnnnnnnnnnnnnnnnnnnnnnnnnnnnnnnnnnnnnnnnnnnnnnnnnnnnnnnnnnnnnnnnnnnnnnnnnnnnnnnnnnnnnnnnnnnnnnnnnnnnnnnnnnnnnnnnnnnnnnnnnnnnnnnnnnnnnnnnnnnnnnnnnnnnnnnnnnnnnnnnnnnnnnnnnnnnnnnnnnnnnnnnnnnnnnnnnnnnnnnnnnnnnnnnnnnnnnnnnnnnnnnnnnnnnnnnnnnnnnnnnnnnnnnnnnnnnnnnnnnnnnnnnnnnnnnnnnnnnnnnnnnnnnnnnnnnnnnnnnnnnnnnnnnnnnnnnnnnnnnnnnnnnnnnnnnnnnnnnnnnnnnnnnnnnnnnnnnnnnnnnnnnnnnnnnnnnnnnnnnnnnnnnnnnnnnnnnnnnnnnnnnnnnnnnnnnnnnnnnnnnnnnnnnnnnnnnnnnnnnnnnnnnnnnnnnnnnnnnnnnnnnnnnnnnnnnnnnnnnnnnnnnnnnnnnnnnnnnnnnnnnnnnnnnnnnnnnnnnnnnnnnnnnnnnnnnnnnnnnnnnnnnnnnnnnnnnnnnnnnnnnnnnnnnnnnnnnnnnnnnnnnnnnnnnnnnnnnnnnnnnnnnnnnnnnnnnnnnnnnnnnnnnnnnnnnnnnnnnnnnnnnnnnnnnnnnnnnnnnnnnnnnnnnnnnnnnnnnnnnnnnnnnnnnnnnnnnnnnnnnnnnnnnnnnnnnnnnnnnnnnnnnnnnnnnnnnnnnnnnnnnnnnnnnnnnnnnnnnnnnnnnnnnnnnnnnnnnnnnnnnnnnnnnnnnnnnnnnnnnnnnnnnnnnnnnnnnnnnnnnnnnnnnnnnnnnnnnnnnnnnnnnnnnnnnnnnnnnnnnnnnnnnnnnnnnnnnnnnnnnnnnnnnnnnnnnnnnnnnnnnnnnnnnnnnnnnnnnnnnnnnnnnnnnnnnnnnnnnnnnnnnnnnnnnnnnnnnnnnnnnnnnnnnnnnnnnnnnnnnnnnnnnnnnnnnnnnnnnnnnnnnnnnnnnnnnnnnnnnnnnnnnnnnnnnnnnnnnnnnnnnnnnnnnnnnnnnnnnnnnnnnnnnnnnnnnnnnnnnnnnnnnnnnnnnnnnnnnnnnnnnnnnnnnnnnnnnnnnnnnnnnnnnnnnnnnnnnnnnnnnnnnnnnnnnnnnnnnnnnnnnnnnnnnnnnnnnnnnnnnnnnnnnnnnnnnnnnnnnnnnnnnnnnnnnnnnnnnnnnnnnnnnnnnnnnnnnnnnnnnnnnnnnnnnnnnnnnnnnnnnnnnnnnnnnnnnnnnnnnnnnnnnnnnnnnnnnnnnnnnnnnnnnnnnnnnnnnnnnnnnnnnnnnnnnnnnnnnnnnnnnnnnnnnnnnnnnnnnnnnnnnnnnnnnnnnnnnnnnnnnnnnnnnnnnnnnnnnnnnnnnnnnnnnnnnnnnnnnnnnnnnnnnnnnnnnnnnnnnnnnnnnnnnnnnnnnnnnnnnnnnnnnnnnnnnnnnnnnnnnnnnnnnnnnnnnnnnnnnnnnnnnnnnnnnnnnnnnnnnnnnnnnnnnnnnnnnnnnnnnnnnnnnnnnnnnnnnnnnnnnnnnnnnnnnnnnnnnnnnnnnnnnnnnnnnnnnnnnnnnnnnnnnnnnnnnnnnnnnnnnnnnnnnnnnnnnnnnnnnnnnnnnnnnnnnnnnnnnnnnnnnnnnnnnnnnnnnnnnnnnnnnnnnnnnnnnnnnnnnnnnnnnnnnnnnnnnnnnnnnnnnnnnnnnnnnnnnnnnnnnnnnnnnnnnnnnnnnnnnnnnnnnnnnnnnnnnnnnnnnnnnnnnnnnnnnnnnnnnnnnnnnnnnnnnnnnnnnnnnnnnnnnnnnnnnnnnnnnnnnnnnnnnnnnnnnnnnnnnnnnnnnnnnnnnnnnnnnnnnnnnnnnnnnnnnnnnnnnnnnnnnnnnnnnnnnnnnnnnnnnnnnnnnnnnnnnnnnnnnnnnnnnnnnnnnnnnnnnnnnnnnnnnnnnnnnnnnnnnnnnnnnnnnnnnnnnnnnnnnnnnnnnnnnnnnnnnnnnnnnnnnnnnnnnnnnnnnnnnnnnnnnnnnnnnnnnnnnnnnnnnnnnnnnnnnnnnnnnnnnnnnnnnnnnnnnnnnnnnnnnnnnnnnnnnnnnnnnnnnnnnnnnnnnnnnnnnnnnnnnnnnnnnnnnnnnnnnnnnnnnnnnnnnnnnnnnnnnnnnnnnnnnnnnnnnnnnnnnnnnnnnnnnnnnnnnnnnnnnnnnnnnnnnnnnnnnnnnnnnnnnnnnnnnnnnnnnnnnnnnnnnnnnnnnnnnnnnnnnnnnnnnnnnnnnnnnnnnnnnnnnnnnnnnnnnnnnnnnnnnnnnnnnnnnnnnnnnnnnnnnnnnnnnnnnnnnnnnnnnnnnnnnnnnnnnnnnnnnnnnnnnnnnnnnnnnnnnnnnnnnnnnnnnnnnnnnnnnnnnnnnnnnnnnnnnnnnnnnnnnnnnnnnnnnnnnnnnnnnnnnnnnnnnnnnnnnnnnnnnnnnnnnnnnnnnnnnnnnnnnnnnnnnnnnnnnnnnnnnnnnnnnnnnnnnnnnnnnnnnnnnnnnnnnnnnnnnnnnnnnnnnnnnnnnnnnnnnnnnnnnnnnnnnnnnnnnnnnnnnnnnnnnnnnnnnnnnnnnnnnnnnnnnnnnnnnnnnnnnnnnnnnnnnnnnnnnnnnnnnnnnnnnnnnnnnnnnnnnnnnnnnnnnnnnnnnnnnnnnnnnnnnnnnnnnnnnnnnnnnnnnnnnnnnnnnnnnnnnnnnnnnnnnnnnnnnnnnnnnnnnnnnnnnnnnnnnnnnnnnnnnnnnnnnnnnnnnnnnnnnnnnnnnnnnnnnnnnnnnnnnnnnnnnnnnnnnnnnnnnnnnnnnnnnnnnnnnnnnnnnnnnnnnnnnnnnnnnnnnnnnnnnnnnnnnnnnnnnnnnnnnnnnnnnnnnnnnnnnnnnnnnnnnnnnnnnnnnnnnnnnnnnnnnnnnnnnnnnnnnnnnnnnnnnnnnnnnnnnnnnnnnnnnnnnnnnnnnnnnnnnnnnnnnnnnnnnnnnnnnnnnnnnnnnnnnnnnnnnnnnnnnnnnnnnnnnnnnnnnnnnnnnnnnnnnnnnnnnnnnnnnnnnnnnnnnnnnnnnnnnnnnnnnnnnnnnnnnnnnnnnnnnnnnnnnnnnnnnnnnnnnnnnnnnnnnnnnnnnnnnnnnnnnnnnnnnnnnnnnnnnnnnnnnnnnnnnnnnnnnnnnnnnnnnnnnnnnnnnnnnnnnnnnnnnnnnnnnnnnnnnnnnnnnnnnnnnnnnnnnnnnnnnnnnnnnnnnnnnnnnnnnnnnnnnnnnnnnnnnnnnnnnnnnnnnnnnnnnnnnnnnnnnnnnnnnnnnnnnnnnnnnnnnnnnnnnnnnnnnnnnnnnnnnnnnnnnnnnnnnnnnnnnnnnnnnnnnnnnnnnnnnnnnnnnnnnnnnnnnnnnnnnnnnnnnnnnnnnnnnnnnnnnnnnnnnnnnnnnnnnnnnnnnnnnnnnnnnnnnnnnnnnnnnnnnnnnnnnnnnnnnnnnnnnnnnnnnnnnnnnnnnnnnnnnnnnnnnnnnnnnnnnnnnnnnnnnnnnnnnnnnnnnnnnnnnnnnnnnnnnnnnnnnnnnnnnnnnnnnnnnnnnnnnnnnnnnnnnnnnnnnnnnnnnnnnnnnnnnnnnnnnnnnnnnnnnnnnnnnnnnnnnnnnnnnnnnnnnnnnnnnnnnnnnnnnnnnnnnnnnnnnnnnnnnnnnnnnnnnnnnnnnnnnnnnnnnnnnnnnnnnnnnnnnnnnnnnnnnnnnnnnnnnnnnnnnnnnnnnnnnnnnnnnnnnnnnnnnnnnnnnnnnnnnnnnnnnnnnnnnnnnnnnnnnnnnnnnnnnnnnnnnnnnnnnnnnnnnnnnnnnnnnnnnnnnnnnnnnnnnnnnnnnnnnnnnnnnnnnnnnnnnnnnnnnnnnnnnnnnnnnnnnnnnnnnnnnnnnnnnnnnnnnnnnnnnnnnnnnnnnnnnnnnnnnnnnnnnnnnnnnnnnnnnnnnnnnnnnnnnnnnnnnnnnnnnnnnnnnnnnnnnnnnnnnnnnnnnnnnnnnnnnnnnnnnnnnnnnnnnnnnnnnnnnnnnnnnnnnnnnnnnnnnnnnnnnnnnnnnnnnnnnnnnnnnnnnnnnnnnnnnnnnnnnnnnnnnnnnnnnnnnnnnnnnnnnnnnnnnnnnnnnnnnnnnnnnnnnnnnnnnnnnnnnnnnnnnnnnnnnnnnnnnnnnnnnnnnnnnnnnnnnnnnnnnnnnnnnnnnnnnnnnnnnnnnnnnnnnnnnnnnnnnnnnnnnnnnnnnnnnnnnnnnnnnnnnnnnnnnnnnnnnnnnnnnnnnnnnnnnnnnnnnnnnnnnnnnnnnnnnnnnnnnnnnnnnnnnnnnnnnnnnnnnnnnnnnnnnnnnnnnnnnnnnnnnnnnnnnnnnnnnnnnnnnnnnnnnnnnnnnnnnnnnnnnnnnnnnnnnnnnnnnnnnnnnnnnnnnnnnnnnnnnnnnnnnnnnnnnnnnnnnnnnnnnnnnnnnnnnnnnnnnnnnnnnnnnnnnnnnnnnnnnnnnnnnnnnnnnnnnnnnnnnnnnnnnnnnnnnnnnnnnnnnnnnnnnnnnnnnnnnnnnnnnnnnnnnnnnnnnnnnnnnnnnnnnnnnnnnnnnnnnnnnnnnnnnnnnnnnnnnnnnnnnnnnnnnnnnnnnnnnnnnnnnnnnnnnnnnnnnnnnnnnnnnnnnnnnnnnnnnnnnnnnnnnnnnnnnnnnnnnnnnnnnnnnnnnnnnnnnnnnnnnnnnnnnnnnnnnnnnnnnnnnnnnnnnnnnnnnnnnnnnnnnnnnnnnnnnnnnnnnnnnnnnnnnnnnnnnnnnnnnnnnnnnnnnnnnnnnnnnnnnnnnnnnnnnnnnnnnnnnnnnnnnnnnnnnnnnnnnnnnnnnnnnnnnnnnnnnnnnnnnnnnnnnnnnnnnnnnnnnnnnnnnnnnnnnnnnnnnnnnnnnnnnnnnnnnnnnnnnnnnnnnnnnnnnnnnnnnnnnnnnnnnnnnnnnnnnnnnnnnnnnnnnnnnnnnnnnnnnnnnnnnnnnnnnnnnnnnnnnnnnnnnnnnnnnnnnnnnnnnnnnnnnnnnnnnnnnnnnnnnnnnnnnnnnnnnnnnnnnnnnnnnnnnnnnnnnnnnnnnnnnnnnnnnnnnnnnnnnnnnnnnnnnnnnnnnnnnnnnnnnnnnnnnnnnnnnnnnnnnnnnnnnnnnnnnnnnnnnnnnnnnnnnnnnnnnnnnnnnnnnnnnnnnnnnnnnnnnnnnnnnnnnnnnnnnnnnnnnnnnnnnnnnnnnnnnnnnnnnnnnnnnnnnnnnnnnnnnnnnnnnnnnnnnnnnnnnnnnnnnnnnnnnnnnnnnnnnnnnnnnnnnnnnnnnnnnnnnnnnnnnnnnnnnnnnnnnnnnnnnnnnnnnnnnnnnnnnnnnnnnnnnnnnnnnnnnnnnnnnnnnnnnnnnnnnnnnnnnnnnnnnnnnnnnnnnnnnnnnnnnnnnnnnnnnnnnnnnnnnnnnnnnnnnnnnnnnnnnnnnnnnnnnnnnnnnnnnnnnnnnnnnnnnnnnnnnnnnnnnnnnnnnnnnnnnnnnnnnnnnnnnnnnnnnnnnnnnnnnnnnnnnnnnnnnnnnnnnnnnnnnnnnnnnnnnnnnnnnnnnnnnnnnnnnnnnnnnnnnnnnnnnnnnnnnnnnnnnnnnnnnnnnnnnnnnnnnnnnnnnnnnnnnnnnnnnnnnnnnnnnnnnnnnnnnnnnnnnnnnnnnnnnnnnnnnnnnnnnnnnnnnnnnnnnnnnnnnnnnnnnnnnnnnnnnnnnnnnnnnnnnnnnnnnnnnnnnnnnnnnnnnnnnnnnnnnnnnnnnnnnnnnnnnnnnnnnnnnnnnnnnnnnnnnnnnnnnnnnnnnnnnnnnnnnnnnnnnnnnnnnnnnnnnnnnnnnnnnnnnnnnnnnnnnnnnnnnnnnnnnnnnnnnnnnnnnnnnnnnnnnnnnnnnnnnnnnnnnnnnnnnnnnnnnnnnnnnnnnnnnnnnnnnnnnnnnnnnnnnnnnnnnnnnnnnnnnnnnnnnnnnnnnnnnnnnnnnnnnnnnnnnnnnnnnnnnnnnnnnnnnnnnnnnnnnnnnnnnnnnnnnnnnnnnnnnnnnnnnnnnnnnnnnnnnnnnnnnnnnnnnnnnnnnnnnnnnnnnnnnnnnnnnnnnnnnnnnnnnnnnnnnnnnnnnnnnnnnnnnnnnnnnnnnnnnnnnnnnnnnnnnnnnnnnnnnnnnnnnnnnnnnnnnnnnnnnnnnnnnnnnnnnnnnnnnnnnnnnnnnnnnnnnnnnnnnnnnnnnnnnnnnnnnnnnnnnnnnnnnnnnnnnnnnnnnnnnnnnnnnnnnnnnnnnnnnnnnnnnnnnnnnnnnnnnnnnnnnnnnnnnnnnnnnnnnnnnnnnnnnnnnnnnnnnnnnnnnnnnnnnnnnnnnnnnnnnnnnnnnnnnnnnnnnnnnnnnnnnnnnnnnnnnnnnnnnnnnnnnnnnnnnnnnnnnnnnnnnnnnnnnnnnnnnnnnnnnnnnnnnnnnnnnnnnnnnnnnnnnnnnnnnnnnnnnnnnnnnnnnnnnnnnnnnnnnnnnnnnnnnnnnnnnnnnnnnnnnnnnnnnnnnnnnnnnnnnnnnnnnnnnnnnnnnnnnnnnnnnnnnnnnnnnnnnnnnnnnnnnnnnnnnnnnnnnnnnnnnnnnnnnnnnnnnnnnnnnnnnnnnnnnnnnnnnnnnnnnnnnnnnnnnnnnnnnnnnnnnnnnnnnnnnnnnnnnnnnnnnnnnnnnnnnnnnnnnnnnnnnnnnnnnnnnnnnnnnnnnnnnnnnnnnnnnnnnnnnnnnnnnnnnnnnnnnnnnnnnnnnnnnnnnnnnnnnnnnnnnnnnnnnnnnnnnnnnnnnnnnnnnnnnnnnnnnnnnnnnnnnnnnnnnnnnnnnnnnnnnnnnnnnnnnnnnnnnnnnnnnnnnnnnnnnnnnnnnnnnnnnnnnnnnnnnnnnnnnnnnnnnnnnnnnnnnnnnnnnnnnnnnnnnnnnnnnnnnnnnnnnnnnnnnnnnnnnnnnnnnnnnnnnnnnnnnnnnnnnnnnnnnnnnnnnnnnnnnnnnnnnnnnnnnnnnnnnnnnnnnnnnnnnnnnnnnnnnnnnnnnnnnnnnnnnnnnnnnnnnnnnnnnnnnnnnnnnnnnnnnnnnnnnnnnnnnnnnnnnnnnnnnnnnnnnnnnnnnnnnnnnnnnnnnnnnnnnnnnnnnnnnnnnnnnnnnnnnnnnnnnnnnnnnnnnnnnnnnnnnnnnnnnnnnnnnnnnnnnnnnnnnnnnnnnnnnnnnnnnnnnnnnnnnnnnnnnnnnnnnnnnnnnnnnnnnnnnnnnnnnnnnnnnnnnnnnnnnnnnnnnnnnnnnnnnnnnnnnnnnnnnnnnnnnnnnnnnnnnnnnnnnnnnnnnnnnnnnnnnnnnnnnnnnnnnnnnnnnnnnnnnnnnnnnnnnnnnnnnnnnnnnnnnnnnnnnnnnnnnnnnnnnnnnnnnnnnnnnnnnnnnnnnnnnnnnnnnnnnnnnnnnnnnnnnnnnnnnnnnnnnnnnnnnnnnnnnnnnnnnnnnnnnnnnnnnnnnnnnnnnnnnnnnnnnnnnnnnnnnnnnnnnnnnnnnnnnnnnnnnnnnnnnnnnnnnnnnnnnnnnnnnnnnnnnnnnnnnnnnnnnnnnnnnnnnnnnnnnnnnnnnnnnnnnnnnnnnnnnnnnnnnnnnnnnnnnnnnnnnnnnnnnnnnnnnnnnnnnnnnnnnnnnnnnnnnnnnnnnnnnnnnnnnnnnnnnnnnnnnnnnnnnnnnnnnnnnnnnnnnnnnnnnnnnnnnnnnnnnnnnnnnnnnnnnnnnnnnnnnnnnnnnnnnnnnnnnnnnnnnnnnnnnnnnnnnnnnnnnnnnnnnnnnnnnnnnnnnnnnnnnnnnnnnnnnnnnnnnnnnnnnnnnnnnnnnnnnnnnnnnnnnnnnnnnnnnnnnnnnnnnnnnnnnnnnnnnnnnnnnnnnnnnnnnnnnnnnnnnnnnnnnnnnnnnnnnnnnnnnnnnnnnnnnnnnnnnnnnnnnnnnnnnnnnnnnnnnnnnnnnnnnnnnnnnnnnnnnnnnnnnnnnnnnnnnnnnnnnnnnnnnnnnnnnnnnnnnnnnnnnnnnnnnnnnnnnnnnnnnnnnnnnnnnnnnnnnnnnnnnnnnnnnnnnnnnnnnnnnnnnnnnnnnnnnnnnnnnnnnnnnnnnnnnnnnnnnnnnnnnnnnnnnnnnnnnnnnnnnnnnnnnnnnnnnnnnnnnnnnnnnnnnnnnnnnnnnnnnnnnnnnnnnnnnnnnnnnnnnnnnnnnnnnnnnnnnnnnnnnnnnnnnnnnnnnnnnnnnnnnnnnnnnnnnnnnnnnnnnnnnnnnnnnnnnnnnnnnnnnnnnnnnnnnnnnnnnnnnnnnnnnnnnnnnnnnnnnnnnnnnnnnnnnnnnnnnnnnnnnnnnnnnnnnnnnnnnnnnnnnnnnnnnnnnnnnnnnnnnnnnnnnnnnnnnnnnnnnnnnnnnnnnnnnnnnnnnnnnnnnnnnnnnnnnnnnnnnnnnnnnnnnnnnnnnnnnnnnnnnnnnnnnnnnnnnnnnnnnnnnnnnnnnnnnnnnnnnnnnnnnnnnnnnnnnnnnnnnnnnnnnnnnnnnnnnnnnnnnnnnnnnnnnnnnnnnnnnnnnnnnnnnnnnnnnnnnnnnnnnnnnnnnnnnnnnnnnnnnnnnnnnnnnnnnnnnnnnnnnnnnnnnnnnnnnnnnnnnnnnnnnnnnnnnnnnnnnnnnnnnnnnnnnnnnnnnnnnnnnnnnnnnnnnnnnnnnnnnnnnnnnnnnnnnnnnnnnnnnnnnnnnnnnnnnnnnnnnnnnnnnnnnnnnnnnnnnnnnnnnnnnnnnnnnnnnnnnnnnnnnnnnnnnnnnnnnnnnnnnnnnnnnnnnnnnnnnnnnnnnnnnnnnnnnnnnnnnnnnnnnnnnnnnnnnnnnnnnnnnnnnnnnnnnnnnnnnnnnnnnnnnnnnnnnnnnnnnnnnnnnnnnnnnnnnnnnnnnnnnnnnnnnnnnnnnnnnnnnnnnnnnnnnnnnnnnnnnnnnnnnnnnnnnnnnnnnnnnnnnnnnnnnnnnnnnnnnnnnnnnnnnnnnnnnnnnnnnnnnnnnnnnnnnnnnnnnnnnnnnnnnnnnnnnnnnnnnnnnnnnnnnnnnnnnnnnnnnnnnnnnnnnnnnnnnnnnnnnnnnnnnnnnnnnnnnnnnnnnnnnnnnnnnnnnnnnnnnnnnnnnnnnnnnnnnnnnnnnnnnnnnnnnnnnnnnnnnnnnnnnnnnnnnnnnnnnnnnnnnnnnnnnnnnnnnnnnnnnnnnnnnnnnnnnnnnnnnnnnnnnnnnnnnnnnnnnnnnnnnnnnnnnnnnnnnnnnnnnnnnnnnnnnnnnnnnnnnnnnnnnnnnnnnnnnnnnnnnnnnnnnnnnnnnnnnnnnnnnnnnnnnnnnnnnnnnnnnnnnnnnnnnnnnnnnnnnnnnnnnnnnnnnnnnnnnnnnnnnnnnnnnnnnnnnnnnnnnnnnnnnnnnnnnnnnnnnnnnnnnnnnnnnnnnnnnnnnnnnnnnnnnnnnnnnnnnnnnnnnnnnnnnnnnnnnnnnnnnnnnnnnnnnnnnnnnnnnnnnnnnnnnnnnnnnnnnnnnnnnnnnnnnnnnnnnnnnnnnnnnnnnnnnnnnnnnnnnnnnnnnnnnnnnnnnnnnnnnnnnnnnnnnnnnnnnnnnnnnnnnnnnnnnnnnnnnnnnnnnnnnnnnnnnnnnnnnnnnnnnnnnnnnnnnnnnnnnnnnnnnnnnnnnnnnnnnnnnnnnnnnnnnnnnnnnnnnnnnnnnnnnnnnnnnnnnnnnnnnnnnnnnnnnnnnnnnnnnnnnnnnnnnnnnnnnnnnnnnnnnnnnnnnnnnnnnnnnnnnnnnnnnnnnnnnnnnnnnnnnnnnnnnnnnnnnnnnnnnnnnnnnnnnnnnnnnnnnnnnnnnnnnnnnnnnnnnnnnnnnnnnnnnnnnnnnnnnnnnnnnnnnnnnnnnnnnnnnnnnnnnnnnnnnnnnnnnnnnnnnnnnnnnnnnnnnnnnnnnnnnnnnnnnnnnnnnnnnnnnnnnnnnnnnnnnnnnnnnnnnnnnnnnnnnnnnnnnnnnnnnnnnnnnnnnnnnnnnnnnnnnnnnnnnnnnnnnnnnnnnnnnnnnnnnnnnnnnnnnnnnnnnnnnnnnnnnnnnnnnnnnnnnnnnnnnnnnnnnnnnnnnnnnnnnnnnnnnnnnnnnnnnnnnnnnnnnnnnnnnnnnnnnnnnnnnnnnnnnnnnnnnnnnnnnnnnnnnnnnnnnnnnnnnnnnnnnnnnnnnnnnnnnnnnnnnnnnnnnnnnnnnnnnnnnnnnnnnnnnnnnnnnnnnnnnnnnnnnnnnnnnnnnnnnnnnnnnnnnnnnnnnnnnnnnnnnnnnnnnnnnnnnnnnnnnnnnnnnnnnnnnnnnnnnnnnnnnnnnnnnnnnnnnnnnnnnnnnnnnnnnnnnnnnnnnnnnnnnnnnnnnnnnnnnnnnnnnnnnnnnnnnnnnnnnnnnnnnnnnnnnnnnnnnnnnnnnnnnnnnnnnnnnnnnnnnnnnnnnnnnnnnnnnnnnnnnnnnnnnnnnnnnnnnnnnnnnnnnnnnnnnnnnnnnnnnnnnnnnnnnnnnnnnnnnnnnnnnnnnnnnnnnnnnnnnnnnnnnnnnnnnnnnnnnnnnnnnnnnnnnnnnnnnnnnnnnnnnnnnnnnnnnnnnnnnnnnnnnnnnnnnnnnnnnnnnnnnnnnnnnnnnnnnnnnnnnnnnnnnnnnnnnnnnnnnnnnnnnnnnnnnnnnnnnnnnnnnnnnnnnnnnnnnnnnnnnnnnnnnnnnnnnnnnnnnnnnnnnnnnnnnnnnnnnnnnnnnnnnnnnnnnnnnnnnnnnnnnnnnnnnnnnnnnnnnnnnnnnnnnnnnnnnnnnnnnnnnnnnnnnnnnnnnnnnnnnnnnnnnnnnnnnnnnnnnnnnnnnnnnnnnnnnnnnnnnnnnnnnnnnnnnnnnnnnnnnnnnnnnnnnnnnnnnnnnnnnnnnnnnnnnnnnnnnnnnnnnnnnnnnnnnnnnnnnnnnnnnnnnnnnnnnnnnnnnnnnnnnnnnnnnnnnnnnnnnnnnnnnnnnnnnnnnnnnnnnnnnnnnnnnnnnnnnnnnnnnnnnnnnnnnnnnnnnnnnnnnnnnnnnnnnnnnnnnnnnnnnnnnnnnnnnnnnnnnnnnnnnnnnnnnnnnnnnnnnnnnnnnnnnnnnnnnnnnnnnnnnnnnnnnnnnnnnnnnnnnnnnnnnnnnnnnnnnnnnnnnnnnnnnnnnnnnnnnnnnnnnnnnnnnnnnnnnnnnnnnnnnnnnnnnnnnnnnnnnnnnnnnnnnnnnnnnnnnnnnnnnnnnnnnnnnnnnnnnnnnnnnnnnnnnnnnnnnnnnnnnnnnnnnnnnnnnnnnnnnnnnnnnnnnnnnnnnnnnnnnnnnnnnnnnnnnnnnnnnnnnnnnnnnnnnnnnnnnnnnnnnnnnnnnnnnnnnnnnnnnnnnnnnnnnnnnnnnnnnnnnnnnnnnnnnnnnnnnnnnnnnnnnnnnnnnnnnnnnnnnnnnnnnnnnnnnnnnnnnnnnnnnnnnnnnnnnnnnnnnnnnnnnnnnnnnnnnnnnnnnnnnnnnnnnnnnnnnnnnnnnnnnnnnnnnnnnnnnnnnnnnnnnnnnnnnnnnnnnnnnnnnnnnnnnnnnnnnnnnnnnnnnnnnnnnnnnnnnnnnnnnnnnnnnnnnnnnnnnnnnnnnnnnnnnnnnnnnnnnnnnnnnnnnnnnnnnnnnnnnnnnnnnnnnnnnnnnnnnnnnnnnnnnnnnnnnnnnnnnnnnnnnnnnnnnnnnnnnnnnnnnnnnnnnnnnnnnnnnnnnnnnnnnnnnnnnnnnnnnnnnnnnnnnnnnnnnnnnnnnnnnnnnnnnnnnnnnnnnnnnnnnnnnnnnnnnnnnnnnnnnnnnnnnnnnnnnnnnnnnnnnnnnnnnnnnnnnnnnnnnnnnnnnnnnnnnnnnnnnnnnnnnnnnnnnnnnnnnnnnnnnnnnnnnnnnnnnnnnnnnnnnnnnnnnnnnnnnnnnnnnnnnnnnnnnnnnnnnnnnnnnnnnnnnnnnnnnnnnnnnnnnnnnnnnnnnnnnnnnnnnnnnnnnnnnnnnnnnnnnnnnnnnnnnnnnnnnnnnnnnnnnnnnnnnnnnnnnnnnnnnnnnnnnnnnnnnnnnnnnnnnnnnnnnnnnnnnnnnnnnnnnnnnnnnnnnnnnnnnnnnnnnnnnnnnnnnnnnnnnnnnnnnnnnnnnnnnnnnnnnnnnnnnnnnnnnnnnnnnnnnnnnnnnnnnnnnnnnnnnnnnnnnnnnnnnnnnnnnnnnnnnnnnnnnnnnnnnnnnnnnnnnnnnnnnnnnnnnnnnnnnnnnnnnnnnnnnnnnnnnnnnnnnnnnnnnnnnnnnnnnnnnnnnnnnnnnnnnnnnnnnnnnnnnnnnnnnnnnnnnnnnnnnnnnnnnnnnnnnnnnnnnnnnnnnnnnnnnnnnnnnnnnnnnnnnnnnnnnnnnnnnnnnnnnnnnnnnnnnnnnnnnnnnnnnnnnnnnnnnnnnnnnnnnnnnnnnnnnnnnnnnnnnnnnnnnnnnnnnnnnnnnnnnnnnnnnnnnnnnnnnnnnnnnnnnnnnnnnnnnnnnnnnnnnnnnnnnnnnnnnnnnnnnnnnnnnnnnnnnnnnnnnnnnnnnnnnnnnnnnnnnnnnnnnnnnnnnnnnnnnnnnnnnnnnnnnnnnnnnnnnnnnnnnnnnnnnnnnnnnnnnnnnnnnnnnnnnnnnnnnnnnnnnnnnnnnnnnnnnnnnnnnnnnnnnnnnnnnnnnnnnnnnnnnnnnnnnnnnnnnnnnnnnnnnnnnnnnnnnnnnnnnnnnnnnnnnnnnnnnnnnnnnnnnnnnnnnnnnnnnnnnnnnnnnnnnnnnnnnnnnnnnnnnnnnnnnnnnnnnnnnnnnnnnnnnnnnnnnnnnnnnnnnnnnnnnnnnnnnnnnnnnnnnnnnnnnnnnnnnnnnnnnnnnnnnnnnnnnnnnnnnnnnnnnnnnnnnnnnnnnnnnnnnnnnnnnnnnnnnnnnnnnnnnnnnnnnnnnnnnnnnnnnnnnnnnnnnnnnnnnnnnnnnnnnnnnnnnnnnnnnnnnnnnnnnnnnnnnnnnnnnnnnnnnnnnnnnnnnnnnnnnnnnnnnnnnnnnnnnnnnnnnnnnnnnnnnnnnnnnnnnnnnnnnnnnnnnnnnnnnnnnnnnnnnnnnnnnnnnnnnnnnnnnnnnnnnnnnnnnnnnnnnnnnnnnnnnnnnnnnnnnnnnnnnnnnnnnnnnnnnnnnnnnnnnnnnnnnnnnnnnnnnnnnnnnnnnnnnnnnnnnnnnnnnnnnnnnnnnnnnnnnnnnnnnnnnnnnnnnnnnnnnnnnnnnnnnnnnnnnnnnnnnnnnnnnnnnnnnnnnnnnnnnnnnnnnnnnnnnnnnnnnnnnnnnnnnnnnnnnnnnnnnnnnnnnnnnnnnnnnnnnnnnnnnnnnnnnnnnnnnnnnnnnnnnnnnnnnnnnnnnnnnnnnnnnnnnnnnnnnnnnnnnnnnnnnnnnnnnnnnnnnnnnnnnnnnnnnnnnnnnnnnnnnnnnnnnnnnnnnnnnnnnnnnnnnnnnnnnnnnnnnnnnnnnnnnnnnnnnnnnnnnnnnnnnnnnnnnnnnnnnnnnnnnnnnnnnnnnnnnnnnnnnnnnnnnnnnnnnnnnnnnnnnnnnnnnnnnnnnnnnnnnnnnnnnnnnnnnnnnnnnnnnnnnnnnnnnnnnnnnnnnnnnnnnnnnnnnnnnnnnnnnnnnnnnnnnnnnnnnnnnnnnnnnnnnnnnnnnnnnnnnnnnnnnnnnnnnnnnnnnnnnnnnnnnnnnnnnnnnnnnnnnnnnnnnnnnnnnnnnnnnnnnnnnnnnnnnnnnnnnnnnnnnnnnnnnnnnnnnnnnnnnnnnnnnnnnnnnnnnnnnnnnnnnnnnnnnnnnnnnnnnnnnnnnnnnnnnnnnnnnnnnnnnnnnnnnnnnnnnnnnnnnnnnnnnnnnnnnnnnnnnnnnnnnnnnnnnnnnnnnnnnnnnnnnnnnnnnnnnnnnnnnnnnnnnnnnnnnnnnnnnnnnnnnnnnnnnnnnnnnnnnnnnnnnnnnnnnnnnnnnnnnnnnnnnnnnnnnnnnnnnnnnnnnnnnnnnnnnnnnnnnnnnnnnnnnnnnnnnnnnnnnnnnnnnnnnnnnnnnnnnnnnnnnnnnnnnnnnnnnnnnnnnnnnnnnnnnnnnnnnnnnnnnnnnnnnnnnnnnnnnnnnnnnnnnnnnnnnnnnnnnnnnnnnnnnnnnnnnnnnnnnnnnnnnnnnnnnnnnnnnnnnnnnnnnnnnnnnnnnnnnnnnnnnnnnnnnnnnnnnnnnnnnnnnnnnnnnnnnnnnnnnnnnnnnnnnnnnnnnnnnnnnnnnnnnnnnnnnnnnnnnnnnnnnnnnnnnnnnnnnnnnnnnnnnnnnnnnnnnnnnnnnnnnnnnnnnnnnnnnnnnnnnnnnnnnnnnnnnnnnnnnnnnnnnnnnnnnnnnnnnnnnnnnnnnnnnnnnnnnnnnnnnnnnnnnnnnnnnnnnnnnnnnnnnnnnnnnnnnnnnnnnnnnnnnnnnnnnnnnnnnnnnnnnnnnnnnnnnnnnnnnnnnnnnnnnnnnnnnnnnnnnnnnnnnnnnnnnnnnnnnnnnnnnnnnnnnnnnnnnnnnnnnnnnnnnnnnnnnnnnnnnnnnnnnnnnnnnnnnnnnnnnnnnnnnnnnnnnnnnnnnnnnnnnnnnnnnnnnnnnnnnnnnnnnnnnnnnnnnnnnnnnnnnnnnnnnnnnnnnnnnnnnnnnnnnnnnnnnnnnnnnnnnnnnnnnnnnnnnnnnnnnnnnnnnnnnnnnnnnnnnnnnnnnnnnnnnnnnnnnnnnnnnnnnnnnnnnnnnnnnnnnnnnnnnnnnnnnnnnnnnnnnnnnnnnnnnnnnnnnnnnnnnnnnnnnnnnnnnnnnnnnnnnnnnnnnnnnnnnnnnnnnnnnnnnnnnnnnnnnnnnnnnnnnnnnnnnnnnnnnnnnnnnnnnnnnnnnnnnnnnnnnnnnnnnnnnnnnnnnnnnnnnnnnnnnnnnnnnnnnnnnnnnnnnnnnnnnnnnnnnnnnnnnnnnnnnnnnnnnnnnnnnnnnnnnnnnnnnnnnnnnnnnnnnnnnnnnnnnnnnnnnnnnnnnnnnnnnnnnnnnnnnnnnnnnnnnnnnnnnnnnnnnnnnnnnnnnnnnnnnnnnnnnnnnnnnnnnnnnnnnnnnnnnnnnnnnnnnnnnnnnnnnnnnnnnnnnnnnnnnnnnnnnnnnnnnnnnnnnnnnnnnnnnnnnnnnnnnnnnnnnnnnnnnnnnnnnnnnnnnnnnnnnnnnnnnnnnnnnnnnnnnnnnnnnnnnnnnnnnnnnnnnnnnnnnnnnnnnnnnnnnnnnnnnnnnnnnnnnnnnnnnnnnnnnnnnnnnnnnnnnnnnnnnnnnnnnnnnnnnnnnnnnnnnnnnnnnnnnnnnnnnnnnnnnnnnnnnnnnnnnnnnnnnnnnnnnnnnnnnnnnnnnnnnnnnnnnnnnnnnnnnnnnnnnnnnnnnnnnnnnnnnnnnnnnnnnnnnnnnnnnnnnnnnnnnnnnnnnnnnnnnnnnnnnnnnnnnnnnnnnnnnnnnnnnnnnnnnnnnnnnnnnnnnnnnnnnnnnnnnnnnnnnnnnnnnnnnnnnnnnnnnnnnnnnnnnnnnnnnnnnnnnnnnnnnnnnnnnnnnnnnnnnnnnnnnnnnnnnnnnnnnnnnnnnnnnnnnnnnnnnnnnnnnnnnnnnnnnnnnnnnnnnnnnnnnnnnnnnnnnnnnnnnnnnnnnnnnnnnnnnnnnnnnnnnnnnnnnnnnnnnnnnnnnnnnnnnnnnnnnnnnnnnnnnnnnnnnnnnnnnnnnnnnnnnnnnnnnnnnnnnnnnnnnnnnnnnnnnnnnnnnnnnnnnnnnnnnnnnnnnnnnnnnnnnnnnnnnnnnnnnnnnnnnnnnnnnnnnnnnnnnnnnnnnnnnnnnnnnnnnnnnnnnnnnnnnnnnnnnnnnnnnnnnnnnnnnnnnnnnnnnnnnnnnnnnnnnnnnnnnnnnnnnnnnnnnnnnnnnnnnnnnnnnnnnnnnnnnnnnnnnnnnnnnnnnnnnnnnnnnnnnnnnnnnnnnnnnnnnnnnnnnnnnnnnnnnnnnnnnnnnnnnnnnnnnnnnnnnnnnnnnnnnnnnnnnnnnnnnnnnnnnnnnnnnnnnnnnnnnnnnnnnnnnnnnnnnnnnnnnnnnnnnnnnnnnnnnnnnnnnnnnnnnnnnnnnnnnnnnnnnnnnnnnnnnnnnnnnnnnnnnnnnnnnnnnnnnnnnnnnnnnnnnnnnnnnnnnnnnnnnnnnnnnnnnnnnnnnnnnnnnnnnnnnnnnnnnnnnnnnnnnnnnnnnnnnnnnnnnnnnnnnnnnnnnnnnnnnnnnnnnnnnnnnnnnnnnnnnnnnnnnnnnnnnnnnnnnnnnnnnnnnnnnnnnnnnnnnnnnnnnnnnnnnnnnnnnnnnnnnnnnnnnnnnnnnnnnnnnnnnnnnnnnnnnnnnnnnnnnnnnnnnnnnnnnnnnnnnnnnnnnnnnnnnnnnnnnnnnnnnnnnnnnnnnnnnnnnnnnnnnnnnnnnnnnnnnnnnnnnnnnnnnnnnnnnnnnnnnnnnnnnnnnnnnnnnnnnnnnnnnnnnnnnnnnnnnnnnnnnnnnnnnnnnnnnnnnnnnnnnnnnnnnnnnnnnnnnnnnnnnnnnnnnnnnnnnnnnnnnnnnnnnnnnnnnnnnnnnnnnnnnnnnnnnnnnnnnnnnnnnnnnnnnnnnnnnnnnnnnnnnnnnnnnnnnnnnnnnnnnnnnnnnnnnnnnnnnnnnnnnnnnnnnnnnnnnnnnnnnnnnnnnnnnnnnnnnnnnnnnnnnnnnnnnnnnnnnnnnnnnnnnnnnnnnnnnnnnnnnnnnnnnnnnnnnnnnnnnnnnnnnnnnnnnnnnnnnnnnnnnnnnnnnnnnnnnnnnnnnnnnnnnnnnnnnnnnnnnnnnnnnnnnnnnnnnnnnnnnnnnnnnnnnnnnnnnnnnnnnnnnnnnnnnnnnnnnnnnnnnnnnnnnnnnnnnnnnnnnnnnnnnnnnnnnnnnnnnnnnnnnnnnnnnnnnnnnnnnnnnnnnnnnnnnnnnnnnnnnnnnnnnnnnnnnnnnnnnnnnnnnnnnnnnnnnnnnnnnnnnnnnnnnnnnnnnnnnnnnnnnnnnnnnnnnnnnnnnnnnnnnnnnnnnnnnnnnnnnnnnnnnnnnnnnnnnnnnnnnnnnnnnnnnnnnnnnnnnnnnnnnnnnnnnnnnnnnnnnnnnnnnnnnnnnnnnnnnnnnnnnnnnnnnnnnnnnnnnnnnnnnnnnnnnnnnnnnnnnnnnnnnnnnnnnnnnnnnnnnnnnnnnnnnnnnnnnnnnnnnnnnnnnnnnnnnnnnnnnnnnnnnnnnnnnnnnnnnnnnnnnnnnnnnnnnnnnnnnnnnnnnnnnnnnnnnnnnnnnnnnnnnnnnnnnnnnnnnnnnnnnnnnnnnnnnnnnnnnnnnnnnnnnnnnnnnnnnnnnnnnnnnnnnnnnnnnnnnnnnnnnnnnnnnnnnnnnnnnnnnnnnnnnnnnnnnnnnnnnnnnnnnnnnnnnnnnnnnnnnnnnnnnnnnnnnnnnnnnnnnnnnnnnnnnnnnnnnnnnnnnnnnnnnnnnnnnnnnnnnnnnnnnnnnnnnnnnnnnnnnnnnnnnnnnnnnnnnnnnnnnnnnnnnnnnnnnnnnnnnnnnnnnnnnnnnnnnnnnnnnnnnnnnnnnnnnnnnnnnnnnnnnnnnnnnnnnnnnnnnnnnnnnnnnnnnnnnnnnnnnnnnnnnnnnnnnnnnnnnnnnnnnnnnnnnnnnnnnnnnnnnnnnnnnnnnnnnnnnnnnnnnnnnnnnnnnnnnnnnnnnnnnnnnnnnnnnnnnnnnnnnnnnnnnnnnnnnnnnnnnnnnnnnnnnnnnnnnnnnnnnnnnnnnnnnnnnnnnnnnnnnnnnnnnnnnnnnnnnnnnnnnnnnnnnnnnnnnnnnnnnnnnnnnnnnnnnnnnnnnnnnnnnnnnnnnnnnnnnnnnnnnnnnnnnnnnnnnnnnnnnnnnnnnnnnnnnnnnnnnnnnnnnnnnnnnnnnnnnnnnnnnnnnnnnnnnnnnnnnnnnnnnnnnnnnnnnnnnnnnnnnnnnnnnnnnnnnnnnnnnnnnnnnnnnnnnnnnnnnnnnnnnnnnnnnnnnnnnnnnnnnnnnnnnnnnnnnnnnnnnnnnnnnnnnnnnnnnnnnnnnnnnnnnnnnnnnnnnnnnnnnnnnnnnnnnnnnnnnnnnnnnnnnnnnnnnnnnnnnnnnnnnnnnnnnnnnnnnnnnnnnnnnnnnnnnnnnnnnnnnnnnnnnnnnnnnnnnnnnnnnnnnnnnnnnnnnnnnnnnnnnnnnnnnnnnnnnnnnnnnnnnnnnnnnnnnnnnnnnnnnnnnnnnnnnnnnnnnnnnnnnnnnnnnnnnnnnnnnnnnnnnnnnnnnnnnnnnnnnnnnnnnnnnnnnnnnnnnnnnnnnnnnnnnnnnnnnnnnnnnnnnnnnnnnnnnnnnnnnnnnnnnnnnnnnnnnnnnnnnnnnnnnnnnnnnnnnnnnnnnnnnnnnnnnnnnnnnnnnnnnnnnnnnnnnnnnnnnnnnnnnnnnnnnnnnnnnnnnnnnnnnnnnnnnnnnnnnnnnnnnnnnnnnnnnnnnnnnnnnnnnnnnnnnnnnnnnnnnnnnnnnnnnnnnnnnnnnnnnnnnnnnnnnnnnnnnnnnnnnnnnnnnnnnnnnnnnnnnnnnnnnnnnnnnnnnnnnnnnnnnnnnnnnnnnnnnnnnnnnnnnnnnnnnnnnnnnnnnnnnnnnnnnnnnnnnnnnnnnnnnnnnnnnnnnnnnnnnnnnnnnnnnnnnnnnnnnnnnnnnnnnnnnnnnnnnnnnnnnnnnnnnnnnnnnnnnnnnnnnnnnnnnnnnnnnnnnnnnnnnnnnnnnnnnnnnnnnnnnnnnnnnnnnnnnnnnnnnnnnnnnnnnnnnnnnnnnnnnnnnnnnnnnnnnnnnnnnnnnnnnnnnnnnnnnnnnnnnnnnnnnnnnnnnnnnnnnnnnnnnnnnnnnnnnnnnnnnnnnnnnnnnnnnnnnnnnnnnnnnnnnnnnnnnnnnnnnnnnnnnnnnnnnnnnnnnnnnnnnnnnnnnnnnnnnnnnnnnnnnnnnnnnnnnnnnnnnnnnnnnnnnnnnnnnnnnnnnnnnnnnnnnnnnnnnnnnnnnnnnnnnnnnnnnnnnnnnnnnnnnnnnnnnnnnnnnnnnnnnnnnnnnnnnnnnnnnnnnnnnnnnnnnnnnnnnnnnnnnnnnnnnnnnnnnnnnnnnnnnnnnnnnnnnnnnnnnnnnnnnnnnnnnnnnnnnnnnnnnnnnnnnnnnnnnnnnnnnnnnnnnnnnnnnnnnnnnnnnnnnnnnnnnnnnnnnnnnnnnnnnnnnnnnnnnnnnnnnnnnnnnnnnnnnnnnnnnnnnnnnnnnnnnnnnnnnnnnnnnnnnnnnnnnnnnnnnnnnnnnnnnnnnnnnnnnnnnnnnnnnnnnnnnnnnnnnnnnnnnnnnnnnnnnnnnnnnnnnnnnnnnnnnnnnnnnnnnnnnnnnnnnnnnnnnnnnnnnnnnnnnnnnnnnnnnnnnnnnnnnnnnnnnnnnnnnnnnnnnnnnnnnnnnnnnnnnnnnnnnnnnnnnnnnnnnnnnnnnnnnnnnnnnnnnnnnnnnnnnnnnnnnnnnnnnnnnnnnnnnnnnnnnnnnnnnnnnnnnnnnnnnnnnnnnnnnnnnnnnnnnnnnnnnnnnnnnnnnnnnnnnnnnnnnnnnnnnnnnnnnnnnnnnnnnnnnnnnnnnnnnnnnnnnnnnnnnnnnnnnnnnnnnnnnnnnnnnnnnnnnnnnnnnnnnnnnnnnnnnnnnnnnnnnnnnnnnnnnnnnnnnnnnnnnnnnnnnnnnnnnnnnnnnnnnnnnnnnnnnnnnnnnnnnnnnnnnnnnnnnnnnnnnnnnnnnnnnnnnnnnnnnnnnnnnnnnnnnnnnnnnnnnnnnnnnnnnnnnnnnnnnnnnnnnnnnnnnnnnnnnnnnnnnnnnnnnnnnnnnnnnnnnnnnnnnnnnnnnnnnnnnnnnnnnnnnnnnnnnnnnnnnnnnnnnnnnnnnnnnnnnnnnnnnnnnnnnnnnnnnnnnnnnnnnnnnnnnnnnnnnnnnnnnnnnnnnnnnnnnnnnnnnnnnnnnnnnnnnnnnnnnnnnnnnnnnnnnnnnnnnnnnnnnnnnnnnnnnnnnnnnnnnnnnnnnnnnnnnnnnnnnnnnnnnnnnnnnnnnnnnnnnnnnnnnnnnnnnnnnnnnnnnnnnnnnnnnnnnnnnnnnnnnnnnnnnnnnnnnnnnnnnnnnnnnnnnnnnnnnnnnnnnnnnnnnnnnnnnnnnnnnnnnnnnnnnnnnnnnnnnnnnnnnnnnnnnnnnnnnnnnnnnnnnnnnnnnnnnnnnnnnnnnnnnnnnnnnnnnnnnnnnnnnnnnnnnnnnnnnnnnnnnnnnnnnnnnnnnnnnnnnnnnnnnnnnnnnnnnnnnnnnnnnnnnnnnnnnnnnnnnnnnnnnnnnnnnnnnnnnnnnnnnnnnnnnnnnnnnnnnnnnnnnnnnnnnnnnnnnnnnnnnnnnnnnnnnnnnnnnnnnnnnnnnnnnnnnnnnnnnnnnnnnnnnnnnnnnnnnnnnnnnnnnnnnnnnnnnnnnnnnnnnnnnnnnnnnnnnnnnnnnnnnnnnnnnnnnnnnnnnnnnnnnnnnnnnnnnnnnnnnnnnnnnnnnnnnnnnnnnnnnnnnnnnnnnnnnnnnnnnnnnnnnnnnnnnnnnnnnnnnnnnnnnnnnnnnnnnnnnnnnnnnnnnnnnnnnnnnnnnnnnnnnnnnnnnnnnnnnnnnnnnnnnnnnnnnnnnnnnnnnnnnnnnnnnnnnnnnnnnnnnnnnnnnnnnnnnnnnnnnnnnnnnnnnnnnnnnnnnnnnnnnnnnnnnnnnnnnnnnnnnnnnnnnnnnnnnnnnnnnnnnnnnnnnnnnnnnnnnnnnnnnnnnnnnnnnnnnnnnnnnnnnnnnnnnnnnnnnnnnnnnnnnnnnnnnnnnnnnnnnnnnnnnnnnnnnnnnnnnnnnnnnnnnnnnnnnnnnnnnnnnnnnnnnnnnnnnnnnnnnnnnnnnnnnnnnnnnnnnnnnnnnnnnnnnnnnnnnnnnnnnnnnnnnnnnnnnnnnnnnnnnnnnnnnnnnnnnnnnnnnnnnnnnnnnnnnnnnnnnnnnnnnnnnnnnnnnnnnnnnnnnnnnnnnnnnnnnnnnnnnnnnnnnnnnnnnnnnnnnnnnnnnnnnnnnnnnnnnnnnnnnnnnnnnnnnnnnnnnnnnnnnnnnnnnnnnnnnnnnnnnnnnnnnnnnnnnnnnnnnnnnnnnnnnnnnnnnnnnnnnnnnnnnnnnnnnnnnnnnnnnnnnnnnnnnnnnnnnnnnnnnnnnnnnnnnnnnnnnnnnnnnnnnnnnnnnnnnnnnnnnnnnnnnnnnnnnnnnnnnnnnnnnnnnnnnnnnnnnnnnnnnnnnnnnnnnnnnnnnnnnnnnnnnnnnnnnnnnnnnnnnnnnnnnnnnnnnnnnnnnnnnnnnnnnnnnnnnnnnnnnnnnnnnnnnnnnnnnnnnnnnnnnnnnnnnnnnnnnnnnnnnnnnnnnnnnnnnnnnnnnnnnnnnnnnnnnnnnnnnnnnnnnnnnnnnnnnnnnnnnnnnnnnnnnnnnnnnnnnnnnnnnnnnnnnnnnnnnnnnnnnnnnnnnnnnnnnnnnnnnnnnnnnnnnnnnnnnnnnnnnnnnnnnnnnnnnnnnnnnnnnnnnnnnnnnnnnnnnnnnnnnnnnnnnnnnnnnnnnnnnnnnnnnnnnnnnnnnnnnnnnnnnnnnnnnnnnnnnnnnnnnnnnnnnnnnnnnnnnnnnnnnnnnnnnnnnnnnnnnnnnnnnnnnnnnnnnnnnnnnnnnnnnnnnnnnnnnnnnnnnnnnnnnnnnnnnnnnnnnnnnnnnnnnnnnnnnnnnnnnnnnnnnnnnnnnnnnnnnnnnnnnnnnnnnnnnnnnnnnnnnnnnnnnnnnnnnnnnnnnnnnnnnnnnnnnnnnnnnnnnnnnnnnnnnnnnnnnnnnnnnnnnnnnnnnnnnnnnnnnnnnnnnnnnnnnnnnnnnnnnnnnnnnnnnnnnnnnnnnnnnnnnnnnnnnnnnnnnnnnnnnnnnnnnnnnnnnnnnnnnnnnnnnnnnnnnnnnnnnnnnnnnnnnnnnnnnnnnnnnnnnnnnnnnnnnnnnnnnnnnnnnnnnnnnnnnnnnnnnnnnnnnnnnnnnnnnnnnnnnnnnnnnnnnnnnnnnnnnnnnnnnnnnnnnnnnnnnnnnnnnnnnnnnnnnnnnnnnnnnnnnnnnnnnnnnnnnnnnnnnnnnnnnnnnnnnnnnnnnnnnnnnnnnnnnnnnnnnnnnnnnnnnnnnnnnnnnnnnnnnnnnnnnnnnnnnnnnnnnnnnnnnnnnnnnnnnnnnnnnnnnnnnnnnnnnnnnnnnnnnnnnnnnnnnnnnnnnnnnnnnnnnnnnnnnnnnnnnnnnnnnnnnnnnnnnnnnnnnnnnnnnnnnnnnnnnnnnnnnnnnnnnnnnnnnnnnnnnnnnnnnnnnnnnnnnnnnnnnnnnnnnnnnnnnnnnnnnnnnnnnnnnnnnnnnnnnnnnnnnnnnnnnnnnnnnnnnnnnnnnnnnnnnnnnnnnnnnnnnnnnnnnnnnnnnnnnnnnnnnnnnnnnnnnnnnnnnnnnnnnnnnnnnnnnnnnnnnnnnnnnnnnnnnnnnnnnnnnnnnnnnnnnnnnnnnnnnnnnnnnnnnnnnnnnnnnnnnnnnnnnnnnnnnnnnnnnnnnnnnnnnnnnnnnnnnnnnnnnnnnnnnnnnnnnnnnnnnnnnnnnnnnnnnnnnnnnnnnnnnnnnnnnnnnnnnnnnnnnnnnnnnnnnnnnnnnnnnnnnnnnnnnnnnnnnnnnnnnnnnnnnnnnnnnnnnnnnnnnnnnnnnnnnnnnnnnnnnnnnnnnnnnnnnnnnnnnnnnnnnnnnnnnnnnnnnnnnnnnnnnnnnnnnnnnnnnnnnnnnnnnnnnnnnnnnnnnnnnnnnnnnnnnnnnnnnnnnnnnnnnnnnnnnnnnnnnnnnnnnnnnnnnnnnnnnnnnnnnnnnnnnnnnnnnnnnnnnnnnnnnnnnnnnnnnnnnnnnnnnnnnnnnnnnnnnnnnnnnnnnnnnnnnnnnnnnnnnnnnnnnnnnnnnnnnnnnnnnnnnnnnnnnnnnnnnnnnnnnnnnnnnnnnnnnnnnnnnnnnnnnnnnnnnnnnnnnnnnnnnnnnnnnnnnnnnnnnnnnnnnnnnnnnnnnnnnnnnnnnnnnnnnnnnnnnnnnnnnnnnnnnnnnnnnnnnnnnnnnnnnnnnnnnnnnnnnnnnnnnnnnnnnnnnnnnnnnnnnnnnnnnnnnnnnnnnnnnnnnnnnnnnnnnnnnnnnnnnnnnnnnnnnnnnnnnnnnnnnnnnnnnnnnnnnnnnnnnnnnnnnnnnnnnnnnnnnnnnnnnnnnnnnnnnnnnnnnnnnnnnnnnnnnnnnnnnnnnnnnnnnnnnnnnnnnnnnnnnnnnnnnnnnnnnnnnnnnnnnnnnnnnnnnnnnnnnnnnnnnnnnnnnnnnnnnnnnnnnnnnnnnnnnnnnnnnnnnnnnnnnnnnnnnnnnnnnnnnnnnnnnnnnnnnnnnnnnnnnnnnnnnnnnnnnnnnnnnnnnnnnnnnnnnnnnnnnnnnnnnnnnnnnnnnnnnnnnnnnnnnnnnnnnnnnnnnnnnnnnnnnnnnnnnnnnnnnnnnnnnnnnnnnnnnnnnnnnnnnnnnnnnnnnnnnnnnnnnnnnnnnnnnnnnnnnnnnnnnnnnnnnnnnnnnnnnnnnnnnnnnnnnnnnnnnnnnnnnnnnnnnnnnnnnnnnnnnnnnnnnnnnnnnnnnnnnnnnnnnnnnnnnnnnnnnnnnnnnnnnnnnnnnnnnnnnnnnnnnnnnnnnnnnnnnnnnnnnnnnnnnnnnnnnnnnnnnnnnnnnnnnnnnnnnnnnnnnnnnnnnnnnnnnnnnnnnnnnnnnnnnnnnnnnnnnnnnnnnnnnnnnnnnnnnnnnnnnnnnnnnnnnnnnnnnnnnnnnnnnnnnnnnnnnnnnnnnnnnnnnnnnnnnnnnnnnnnnnnnnnnnnnnnnnnnnnnnnnnnnnnnnnnnnnnnnnnnnnnnnnnnnnnnnnnnnnnnnnnnnnnnnnnnnnnnnnnnnnnnnnnnnnnnnnnnnnnnnnnnnnnnnnnnnnnnnnnnnnnnnnnnnnnnnnnnnnnnnnnnnnnnnnnnnnnnnnnnnnnnnnnnnnnnnnnnnnnnnnnnnnnnnnnnnnnnnnnnnnnnnnnnnnnnnnnnnnnnnnnnnnnnnnnnnnnnnnnnnnnnnnnnnnnnnnnnnnnnnnnnnnnnnnnnnnnnnnnnnnnnnnnnnnnnnnnnnnnnnnnnnnnnnnnnnnnnnnnnnnnnnnnnnnnnnnnnnnnnnnnnnnnnnnnnnnnnnnnnnnnnnnnnnnnnnnnnnnnnnnnnnnnnnnnnnnnnnnnnnnnnnnnnnnnnnnnnnnnnnnnnnnnnnnnnnnnnnnnnnnnnnnnnnnnnnnnnnnnnnnnnnnnnnnnnnnnnnnnnnnnnnnnnnnnnnnnnnnnnnnnnnnnnnnnnnnnnnnnnnnnnnnnnnnnnnnnnnnnnnnnnnnnnnnnnnnnnnnnnnnnnnnnnnnnnnnnnnnnnnnnnnnnnnnnnnnnnnnnnnnnnnnnnnnnnnnnnnnnnnnnnnnnnnnnnnnnnnnnnnnnnnnnnnnnnnnnnnnnnnnnnnnnnnnnnnnnnnnnnnnnnnnnnnnnnnnnnnnnnnnnnnnnnnnnnnnnnnnnnnnnnnnnnnnnnnnnnnnnnnnnnnnnnnnnnnnnnnnnnnnnnnnnnnnnnnnnnnnnnnnnnnnnnnnnnnnnnnnnnnnnnnnnnnnnnnnnnnnnnnnnnnnnnnnnnnnnnnnnnnnnnnnnnnnnnnnnnnnnnnnnnnnnnnnnnnnnnnnnnnnnnnnnnnnnnnnnnnnnnnnnnnnnnnnnnnnnnnnnnnnnnnnnnnnnnnnnnnnnnnnnnnnnnnnnnnnnnnnnnnnnnnnnnnnnnnnnnnnnnnnnnnnnnnnnnnnnnnnnnnnnnnnnnnnnnnnnnnnnnnnnnnnnnnnnnnnnnnnnnnnnnnnnnnnnnnnnnnnnnnnnnnnnnnnnnnnnnnnnnnnnnnnnnnnnnnnnnnnnnnnnnnnnnnnnnnnnnnnnnnnnnnnnnnnnnnnnnnnnnnnnnnnnnnnnnnnnnnnnnnnnnnnnnnnnnnnnnnnnnnnnnnnnnnnnnnnnnnnnnnnnnnnnnnnnnnnnnnnnnnnnnnnnnnnnnnnnnnnnnnnnnnnnnnnnnnnnnnnnnnnnnnnnnnnnnnnnnnnnnnnnnnnnnnnnnnnnnnnnnnnnnnnnnnnnnnnnnnnnnnnnnnnnnnnnnnnnnnnnnnnnnnnnnnnnnnnnnnnnnnnnnnnnnnnnnnnnnnnnnnnnnnnnnnnnnnnnnnnnnnnnnnnnnnnnnnnnnnnnnnnnnnnnnnnnnnnnnnnnnnnnnnnnnnnnnnnnnnnnnnnnnnnnnnnnnnnnnnnnnnnnnnnnnnnnnnnnnnnnnnnnnnnnnnnnnnnnnnnnnnnnnnnnnnnnnnnnnnnnnnnnnnnnnnnnnnnnnnnnnnnnnnnnnnnnnnnnnnnnnnnnnnnnnnnnnnnnnnnnnnnnnnnnnnnnnnnnnnnnnnnnnnnnnnnnnnnnnnnnnnnnnnnnnnnnnnnnnnnnnnnnnnnnnnnnnnnnnnnnnnnnnnnnnnnnnnnnnnnnnnnnnnnnnnnnnnnnnnnnnnnnnnnnnnnnnnnnnnnnnnnnnnnnnnnnnnnnnnnnnnnnnnnnnnnnnnnnnnnnnnnnnnnnnnnnnnnnnnnnnnnnnnnnnnnnnnnnnnnnnnnnnnnnnnnnnnnnnnnnnnnnnnnnnnnnnnnnnnnnnnnnnnnnnnnnnnnnnnnnnnnnnnnnnnnnnnnnnnnnnnnnnnnnnnnnnnnnnnnnnnnnnnnnnnnnnnnnnnnnnnnnnnnnnnnnnnnnnnnnnnnnnnnnnnnnnnnnnnnnnnnnnnnnnnnnnnnnnnnnnnnnnnnnnnnnnnnnnnnnnnnnnnnnnnnnnnnnnnnnnnnnnnnnnnnnnnnnnnnnnnnnnnnnnnnnnnnnnnnnnnnnnnnnnnnnnnnnnnnnnnnnnnnnnnnnnnnnnnnnnnnnnnnnnnnnnnnnnnnnnnnnnnnnnnnnnnnnnnnnnnnnnnnnnnnnnnnnnnnnnnnnnnnnnnnnnnnnnnnnnnnnnnnnnnnnnnnnnnnnnnnnnnnnnnnnnnnnnnnnnnnnnnnnnnnnnnnnnnnnnnnnnnnnnnnnnnnnnnnnnnnnnnnnnnnnnnnnnnnnnnnnnnnnnnnnnnnnnnnnnnnnnnnnnnnnnnnnnnnnnnnnnnnnnnnnnnnnnnnnnnnnnnnnnnnnnnnnnnnnnnnnnnnnnnnnnnnnnnnnnnnnnnnnnnnnnnnnnnnnnnnnnnnnnnnnnnnnnnnnnnnnnnnnnnnnnnnnnnnnnnnnnnnnnnnnnnnnnnnnnnnnnnnnnnnnnnnnnnnnnnnnnnnnnnnnnnnnnnnnnnnnnnnnnnnnnnnnnnnnnnnnnnnnnnnnnnnnnnnnnnnnnnnnnnnnnnnnnnnnnnnnnnnnnnnnnnnnnnnnnnnnnnnnnnnnnnnnnnnnnnnnnnnnnnnnnnnnnnnnnnnnnnnnnnnnnnnnnnnnnnnnnnnnnnnnnnnnnnnnnnnnnnnnnnnnnnnnnnnnnnnnnnnnnnnnnnnnnnnnnnnnnnnnnnnnnnnnnnnnnnnnnnnnnnnnnnnnnnnnnnnnnnnnnnnnnnnnnnnnnnnnnnnnnnnnnnnnnnnnnnnnnnnnnnnnnnnnnnnnnnnnnnnnnnnnnnnnnnnnnnnnnnnnnnnnnnnnnnnnnnnnnnnnnnnnnnnnnnnnnnnnnnnnnnnnnnnnnnnnnnnnnnnnnnnnnnnnnnnnnnnnnnnnnnnnnnnnnnnnnnnnnnnnnnnnnnnnnnnnnnnnnnnnnnnnnnnnnnnnnnnnnnnnnnnnnnnnnnnnnnnnnnnnnnnnnnnnnnnnnnnnnnnnnnnnnnnnnnnnnnnnnnnnnnnnnnnnnnnnnnnnnnnnnnnnnnnnnnnnnnnnnnnnnnnnnnnnnnnnnnnnnnnnnnnnnnnnnnnnnnnnnnnnnnnnnnnnnnnnnnnnnnnnnnnnnnnnnnnnnnnnnnnnnnnnnnnnnnnnnnnnnnnnnnnnnnnnnnnnnnnnnnnnnnnnnnnnnnnnnnnnnnnnnnnnnnnnnnnnnnnnnnnnnnnnnnnnnnnnnnnnnnnnnnnnnnnnnnnnnnnnnnnnnnnnnnnnnnnnnnnnnnnnnnnnnnnnnnnnnnnnnnnnnnnnnnnnnnnnnnnnnnnnnnnnnnnnnnnnnnnnnnnnnnnnnnnnnnnnnnnnnnnnnnnnnnnnnnnnnnnnnnnnnnnnnnnnnnnnnnnnnnnnnnnnnnnnnnnnnnnnnnnnnnnnnnnnnnnnnnnnnnnnnnnnnnnnnnnnnnnnnnnnnnnnnnnnnnnnnnnnnnnnnnnnnnnnnnnnnnnnnnnnnnnnnnnnnnnnnnnnnnnnnnnnnnnnnnnnnnnnnnnnnnnnnnnnnnnnnnnnnnnnnnnnnnnnnnnnnnnnnnnnnnnnnnnnnnnnnnnnnnnnnnnnnnnnnnnnnnnnnnnnnnnnnnnnnnnnnnnnnnnnnnnnnnnnnnnnnnnnnnnnnnnnnnnnnnnnnnnnnnnnnnnnnnnnnnnnnnnnnnnnnnnnnnnnnnnnnnnnnnnnnnnnnnnnnnnnnnnnnnnnnnnnnnnnnnnnnnnnnnnnnnnnnnnnnnnnnnnnnnnnnnnnnnnnnnnnnnnnnnnnnnnnnnnnnnnnnnnnnnnnnnnnnnnnnnnnnnnnnnnnnnnnnnnnnnnnnnnnnnnnnnnnnnnnnnnnnnnnnnnnnnnnnnnnnnnnnnnnnnnnnnnnnnnnnnnnnnnnnnnnnnnnnnnnnnnnnnnnnnnnnnnnnnnnnnnnnnnnnnnnnnnnnnnnnnnnnnnnnnnnnnnnnnnnnnnnnnnnnnnnnnnnnnnnnnnnnnnnnnnnnnnnnnnnnnnnnnnnnnnnnnnnnnnnnnnnnnnnnnnnnnnnnnnnnnnnnnnnnnnnnnnnnnnnnnnnnnnnnnnnnnnnnnnnnnnnnnnnnnnnnnnnnnnnnnnnnnnnnnnnnnnnnnnnnnnnnnnnnnnnnnnnnnnnnnnnnnnnnnnnnnnnnnnnnnnnnnnnnnnnnnnnnnnnnnnnnnnnnnnnnnnnnnnnnnnnnnnnnnnnnnnnnnnnnnnnnnnnnnnnnnnnnnnnnnnnnnnnnnnnnnnnnnnnnnnnnnnnnnnnnnnnnnnnnnnnnnnnnnnnnnnnnnnnnnnnnnnnnnnnnnnnnnnnnnnnnnnnnnnnnnnnnnnnnnnnnnnnnnnnnnnnnnnnnnnnnnnnnnnnnnnnnnnnnnnnnnnnnnnnnnnnnnnnnnnnnnnnnnnnnnnnnnnnnnnnnnnnnnnnnnnnnnnnnnnnnnnnnnnnnnnnnnnnnnnnnnnnnnnnnnnnnnnnnnnnnnnnnnnnnnnnnnnnnnnnnnnnnnnnnnnnnnnnnnnnnnnnnnnnnnnnnnnnnnnnnnnnnnnnnnnnnnnnnnnnnnnnnnnnnnnnnnnnnnnnnnnnnnnnnnnnnnnnnnnnnnnnnnnnnnnnnnnnnnnnnnnnnnnnnnnnnnnnnnnnnnnnnnnnnnnnnnnnnnnnnnnnnnnnnnnnnnnnnnnnnnnnnnnnnnnnnnnnnnnnnnnnnnnnnnnnnnnnnnnnnnnnnnnnnnnnnnnnnnnnnnnnnnnnnnnnnnnnnnnnnnnnnnnnnnnnnnnnnnnnnnnnnnnnnnnnnnnnnnnnnnnnnnnnnnnnnnnnnnnnnnnnnnnnnnnnnnnnnnnnnnnnnnnnnnnnnnnnnnnnnnnnnnnnnnnnnnnnnnnnnnnnnnnnnnnnnnnnnnnnnnnnnnnnnnnnnnnnnnnnnnnnnnnnnnnnnnnnnnnnnnnnnnnnnnnnnnnnnnnnnnnnnnnnnnnnnnnnnnnnnnnnnnnnnnnnnnnnnnnnnnnnnnnnnnnnnnnnnnnnnnnnnnnnnnnnnnnnnnnnnnnnnnnnnnnnnnnnnnnnnnnnnnnnnnnnnnnnnnnnnnnnnnnnnnnnnnnnnnnnnnnnnnnnnnnnnnnnnnnnnnnnnnnnnnnnnnnnnnnnnnnnnnnnnnnnnnnnnnnnnnnnnnnnnnnnnnnnnnnnnnnnnnnnnnnnnnnnnnnnnnnnnnnnnnnnnnnnnnnnnnnnnnnnnnnnnnnnnnnnnnnnnnnnnnnnnnnnnnnnnnnnnnnnnnnnnnnnnnnnnnnnnnnnnnnnnnnnnnnnnnnnnnnnnnnnnnnnnnnnnnnnnnnnnnnnnnnnnnnnnnnnnnnnnnnnnnnnnnnnnnnnnnnnnnnnnnnnnnnnnnnnnnnnnnnnnnnnnnnnnnnnnnnnnnnnnnnnnnnnnnnnnnnnnnnnnnnnnnnnnnnnnnnnnnnnnnnnnnnnnnnnnnnnnnnnnnnnnnnnnnnnnnnnnnnnnnnnnnnnnnnnnnnnnnnnnnnnnnnnnnnnnnnnnnnnnnnnnnnnnnnnnnnnnnnnnnnnnnnnnnnnnnnnnnnnnnnnnnnnnnnnnnnnnnnnnnnnnnnnnnnnnnnnnnnnnnnnnnnnnnnnnnnnnnnnnnnnnnnnnnnnnnnnnnnnnnnnnnnnnnnnnnnnnnnnnnnnnnnnnnnnnnnnnnnnnnnnnnnnnnnnnnnnnnnnnnnnnnnnnnnnnnnnnnnnnnnnnnnnnnnnnnnnnnnnnnnnnnnnnnnnnnnnnnnnnnnnnnnnnnnnnnnnnnnnnnnnnnnnnnnnnnnnnnnnnnnnnnnnnnnnnnnnnnnnnnnnnnnnnnnnnnnnnnnnnnnnnnnnnnnnnnnnnnnnnnnnnnnnnnnnnnnnnnnnnnnnnnnnnnnnnnnnnnnnnnnnnnnnnnnnnnnnnnnnnnnnnnnnnnnnnnnnnnnnnnnnnnnnnnnnnnnnnnnnnnnnnnnnnnnnnnnnnnnnnnnnnnnnnnnnnnnnnnnnnnnnnnnnnnnnnnnnnnnnnnnnnnnnnnnnnnnnnnnnnnnnnnnnnnnnnnnnnnnnnnnnnnnnnnnnnnnnnnnnnnnnnnnnnnnnnnnnnnnnnnnnnnnnnnnnnnnnnnnnnnnnnnnnnnnnnnnnnnnnnnnnnnnnnnnnnnnnnnnnnnnnnnnnnnnnnnnnnnnnnnnnnnnnnnnnnnnnnnnnnnnnnnnnnnnnnnnnnnnnnnnnnnnnnnnnnnnnnnnnnnnnnnnnnnnnnnnnnnnnnnnnnnnnnnnnnnnnnnnnnnnnnnnnnnnnnnnnnnnnnnnnnnnnnnnnnnnnnnnnnnnnnnnnnnnnnnnnnnnnnnnnnnnnnnnnnnnnnnnnnnnnnnnnnnnnnnnnnnnnnnnnnnnnnnnnnnnnnnnnnnnnnnnnnnnnnnnnnnnnnnnnnnnnnnnnnnnnnnnnnnnnnnnnnnnnnnnnnnnnnnnnnnnnnnnnnnnnnnnnnnnnnnnnnnnnnnnnnnnnnnnnnnnnnnnnnnnnnnnnnnnnnnnnnnnnnnnnnnnnnnnnnnnnnnnnnnnnnnnnnnnnnnnnnnnnnnnnnnnnnnnnnnnnnnnnnnnnnnnnnnnnnnnnnnnnnnnnnnnnnnnnnnnnnnnnnnnnnnnnnnnnnnnnnnnnnnnnnnnnnnnnnnnnnnnnnnnnnnnnnnnnnnnnnnnnnnnnnnnnnnnnnnnnnnnnnnnnnnnnnnnnnnnnnnnnnnnnnnnnnnnnnnnnnnnnnnnnnnnnnnnnnnnnnnnnnnnnnnnnnnnnnnnnnnnnnnnnnnnnnnnnnnnnnnnnnnnnnnnnnnnnnnnnnnnnnnnnnnnnnnnnnnnnnnnnnnnnnnnnnnnnnnnnnnnnnnnnnnnnnnnnnnnnnnnnnnnnnnnnnnnnnnnnnnnnnnnnnnnnnnnnnnnnnnnnnnnnnnnnnnnnnnnnnnnnnnnnnnnnnnnnnnnnnnnnnnnnnnnnnnnnnnnnnnnnnnnnnnnnnnnnnnnnnnnnnnnnnnnnnnnnnnnnnnnnnnnnnnnnnnnnnnnnnnnnnnnnnnnnnnnnnnnnnnnnnnnnnnnnnnnnnnnnnnnnnnnnnnnnnnnnnnnnnnnnnnnnnnnnnnnnnnnnnnnnnnnnnnnnnnnnnnnnnnnnnnnnnnnnnnnnnnnnnnnnnnnnnnnnnnnnnnnnnnnnnnnnnnnnnnnnnnnnnnnnnnnnnnnnnnnnnnnnnnnnnnnnnnnnnnnnnnnnnnnnnnnnnnnnnnnnnnnnnnnnnnnnnnnnnnnnnnnnnnnnnnnnnnnnnnnnnnnnnnnnnnnnnnnnnnnnnnnnnnnnnnnnnnnnnnnnnnnnnnnnnnnnnnnnnnnnnnnnnnnnnnnnnnnnnnnnnnnnnnnnnnnnnnnnnnnnnnnnnnnnnnnnnnnnnnnnnnnnnnnnnnnnnnnnnnnnnnnnnnnnnnnnnnnnnnnnnnnnnnnnnnnnnnnnnnnnnnnnnnnnnnnnnnnnnnnnnnnnnnnnnnnnnnnnnnnnnnnnnnnnnnnnnnnnnnnnnnnnnnnnnnnnnnnnnnnnnnnnnnnnnnnnnnnnnnnnnnnnnnnnnnnnnnnnnnnnnnnnnnnnnnnnnnnnnnnnnnnnnnnnnnnnnnnnnnnnnnnnnnnnnnnnnnnnnnnnnnnnnnnnnnnnnnnnnnnnnnnnnnnnnnnnnnnnnnnnnnnnnnnnnnnnnnnnnnnnnnnnnnnnnnnnnnnnnnnnnnnnnnnnnnnnnnnnnnnnnnnnnnnnnnnnnnnnnnnnnnnnnnnnnnnnnnnnnnnnnnnnnnnnnnnnnnnnnnnnnnnnnnnnnnnnnnnnnnnnnnnnnnnnnnnnnnnnnnnnnnnnnnnnnnnnnnnnnnnnnnnnnnnnnnnnnnnnnnnnnnnnnnnnnnnnnnnnnnnnnnnnnnnnnnnnnnnnnnnnnnnnnnnnnnnnnnnnnnnnnnnnnnnnnnnnnnnnnnnnnnnnnnnnnnnnnnnnnnnnnnnnnnnnnnnnnnnnnnnnnnnnnnnnnnnnnnnnnnnnnnnnnnnnnnnnnnnnnnnnnnnnnnnnnnnnnnnnnnnnnnnnnnnnnnnnnnnnnnnnnnnnnnnnnnnnnnnnnnnnnnnnnnnnnnnnnnnnnnnnnnnnnnnnnnnnnnnnnnnnnnnnnnnnnnnnnnnnnnnnnnnnnnnnnnnnnnnnnnnnnnnnnnnnnnnnnnnnnnnnnnnnnnnnnnnnnnnnnnnnnnnnnnnnnnnnnnnnnnnnnnnnnnnnnnnnnnnnnnnnnnnnnnnnnnnnnnnnnnnnnnnnnnnnnnnnnnnnnnnnnnnnnnnnnnnnnnnnnnnnnnnnnnnnnnnnnnnnnnnnnnnnnnnnnnnnnnnnnnnnnnnnnnnnnnnnnnnnnnnnnnnnnnnnnnnnnnnnnnnnnnnnnnnnnnnnnnnnnnnnnnnnnnnnnnnnnnnnnnnnnnnnnnnnnnnnnnnnnnnnnnnnnnnnnnnnnnnnnnnnnnnnnnnnnnnnnnnnnnnnnnnnnnnnnnnnnnnnnnnnnnnnnnnnnnnnnnnnnnnnnnnnnnnnnnnnnnnnnnnnnnnnnnnnnnnnnnnnnnnnnnnnnnnnnnnnnnnnnnnnnnnnnnnnnnnnnnnnnnnnnnnnnnnnnnnnnnnnnnnnnnnnnnnnnnnnnnnnnnnnnnnnnnnnnnnnnnnnnnnnnnnnnnnnnnnnnnnnnnnnnnnnnnnnnnnnnnnnnnnnnnnnnnnnnnnnnnnnnnnnnnnnnnnnnnnnnnnnnnnnnnnnnnnnnnnnnnnnnnnnnnnnnnnnnnnnnnnnnnnnnnnnnnnnnnnnnnnnnnnnnnnnnnnnnnnnnnnnnnnnnnnnnnnnnnnnnnnnnnnnnnnnnnnnnnnnnnnnnnnnnnnnnnnnnnnnnnnnnnnnnnnnnnnnnnnnnnnnnnnnnnnnnnnnnnnnnnnnnnnnnnnnnnnnnnnnnnnnnnnnnnnnnnnnnnnnnnnnnnnnnnnnnnnnnnnnnnnnnnnnnnnnnnnnnnnnnnnnnnnnnnnnnnnnnnnnnnnnnnnnnnnnnnnnnnnnnnnnnnnnnnnnnnnnnnnnnnnnnnnnnnnnnnnnnnnnnnnnnnnnnnnnnnnnnnnnnnnnnnnnnnnnnnnnnnnnnnnnnnnnnnnnnnnnnnnnnnnnnnnnnnnnnnnnnnnnnnnnnnnnnnnnnnnnnnnnnnnnnnnnnnnnnnnnnnnnnnnnnnnnnnnnnnnnnnnnnnnnnnnnnnnnnnnnnnnnnnnnnnnnnnnnnnnnnnnnnnnnnnnnnnnnnnnnnnnnnnnnnnnnnnnnnnnnnnnnnnnnnnnnnnnnnnnnnnnnnnnnnnnnnnnnnnnnnnnnnnnnnnnnnnnnnnnnnnnnnnnnnnnnnnnnnnnnnnnnnnnnnnnnnnnnnnnnnnnnnnnnnnnnnnnnnnnnnnnnnnnnnnnnnnnnnnnnnnnnnnnnnnnnnnnnnnnnnnnnnnnnnnnnnnnnnnnnnnnnnnnnnnnnnnnnnnnnnnnnnnnnnnnnnnnnnnnnnnnnnnnnnnnnnnnnnnnnnnnnnnnnnnnnnnnnnnnnnnnnnnnnnnnnnnnnnnnnnnnnnnnnnnnnnnnnnnnnnnnnnnnnnnnnnnnnnnnnnnnnnnnnnnnnnnnnnnnnnnnnnnnnnnnnnnnnnnnnnnnnnnnnnnnnnnnnnnnnnnnnnnnnnnnnnnnnnnnnnnnnnnnnnnnnnnnnnnnnnnnnnnnnnnnnnnnnnnnnnnnnnnnnnnnnnnnnnnnnnnnnnnnnnnnnnnnnnnnnnnnnnnnnnnnnnnnnnnnnnnnnnnnnnnnnnnnnnnnnnnnnnnnnnnnnnnnnnnnnnnnnnnnnnnnnnnnnnnnnnnnnnnnnnnnnnnnnnnnnnnnnnnnnnnnnnnnnnnnnnnnnnnnnnnnnnnnnnnnnnnnnnnnnnnnnnnnnnnnnnnnnnnnnnnnnnnnnnnnnnnnnnnnnnnnnnnnnnnnnnnnnnnnnnnnnnnnnnnnnnnnnnnnnnnnnnnnnnnnnnnnnnnnnnnnnnnnnnnnnnnnnnnnnnnnnnnnnnnnnnnnnnnnnnnnnnnnnnnnnnnnnnnnnnnnnnnnnnnnnnnnnnnnnnnnnnnnnnnnnnnnnnnnnnnnnnnnnnnnnnnnnnnnnnnnnnnnnnnnnnnnnnnnnnnnnnnnnnnnnnnnnnnnnnnnnnnnnnnnnnnnnnnnnnnnnnnnnnnnnnnnnnnnnnnnnnnnnnnnnnnnnnnnnnnnnnnnnnnnnnnnnnnnnnnnnnnnnnnnnnnnnnnnnnnnnnnnnnnnnnnnnnnnnnnnnnnnnnnnnnnnnnnnnnnnnnnnnnnnnnnnnnnnnnnnnnnnnnnnnnnnnnnnnnnnnnnnnnnnnnnnnnnnnnnnnnnnnnnnnnnnnnnnnnnnnnnnnnnnnnnnnnnnnnnnnnnnnnnnnnnnnnnnnnnnnnnnnnnnnnnnnnnnnnnnnnnnnnnnnnnnnnnnnnnnnnnnnnnnnnnnnnnnnnnnnnnnnnnnnnnnnnnnnnnnnnnnnnnnnnnnnnnnnnnnnnnnnnnnnnnnnnnnnnnnnnnnnnnnnnnnnnnnnnnnnnnnnnnnnnnnnnnnnnnnnnnnnnnnnnnnnnnnnnnnnnnnnnnnnnnnnnnnnnnnnnnnnnnnnnnnnnnnnnnnnnnnnnnnnnnnnnnnnnnnnnnnnnnnnnnnnnnnnnnnnnnnnnnnnnnnnnnnnnnnnnnnnnnnnnnnnnnnnnnnnnnnnnnnnnnnnnnnnnnnnnnnnnnnnnnnnnnnnnnnnnnnnnnnnnnnnnnnnnnnnnnnnnnnnnnnnnnnnnnnnnnnnnnnnnnnnnnnnnnnnnnnnnnnnnnnnnnnnnnnnnnnnnnnnnnnnnnnnnnnnnnnnnnnnnnnnnnnnnnnnnnnnnnnnnnnnnnnnnnnnnnnnnnnnnnnnnnnnnnnnnnnnnnnnnnnnnnnnnnnnnnnnnnnnnnnnnnnnnnnnnnnnnnnnnnnnnnnnnnnnnnnnnnnnnnnnnnnnnnnnnnnnnnnnnnnnnnnnnnnnnnnnnnnnnnnnnnnnnnnnnnnnnnnnnnnnnnnnnnnnnnnnnnnnnnnnnnnnnnnnnnnnnnnnnnnnnnnnnnnnnnnnnnnnnnnnnnnnnnnnnnnnnnnnnnnnnnnnnnnnnnnnnnnnnnnnnnnnnnnnnnnnnnnnnnnnnnnnnnnnnnnnnnnnnnnnnnnnnnnnnnnnnnnnnnnnnnnnnnnnnnnnnnnnnnnnnnnnnnnnnnnnnnnnnnnnnnnnnnnnnnnnnnnnnnnnnnnnnnnnnnnnnnnnnnnnnnnnnnnnnnnnnnnnnnnnnnnnnnnnnnnnnnnnnnnnnnnnnnnnnnnnnnnnnnnnnnnnnnnnnnnnnnnnnnnnnnnnnnnnnnnnnnnnnnnnnnnnnnnnnnnnnnnnnnnnnnnnnnnnnnnnnnnnnnnnnnnnnnnnnnnnnnnnnnnnnnnnnnnnnnnnnnnnnnnnnnnnnnnnnnnnnnnnnnnnnnnnnnnnnnnnnnnnnnnnnnnnnnnnnnnnnnnnnnnnnnnnnnnnnnnnnnnnnnnnnnnnnnnnnnnnnnnnnnnnnnnnnnnnnnnnnnnnnnnnnnnnnnnnnnnnnnnnnnnnnnnnnnnnnnnnnnnnnnnnnnnnnnnnnnnnnnnnnnnnnnnnnnnnnnnnnnnnnnnnnnnnnnnnnnnnnnnnnnnnnnnnnnnnnnnnnnnnnnnnnnnnnnnnnnnnnnnnnnnnnnnnnnnnnnnnnnnnnnnnnnnnnnnnnnnnnnnnnnnnnnnnnnnnnnnnnnnnnnnnnnnnnnnnnnnnnnnnnnnnnnnnnnnnnnnnnnnnnnnnnnnnnnnnnnnnnnnnnnnnnnnnnnnnnnnnnnnnnnnnnnnnnnnnnnnnnnnnnnnnnnnnnnnnnnnnnnnnnnnnnnnnnnnnnnnnnnnnnnnnnnnnnnnnnnnnnnnnnnnnnnnnnnnnnnnnnnnnnnnnnnnnnnnnnnnnnnnnnnnnnnnnnnnnnnnnnnnnnnnnnnnnnnnnnnnnnnnnnnnnnnnnnnnnnnnnnnnnnnnnnnnnnnnnnnnnnnnnnnnnnnnnnnnnnnnnnnnnnnnnnnnnnnnnnnnnnnnnnnnnnnnnnnnnnnnnnnnnnnnnnnnnnnnnnnnnnnnnnnnnnnnnnnnnnnnnnnnnnnnnnnnnnnnnnnnnnnnnnnnnnnnnnnnnnnnnnnnnnnnnnnnnnnnnnnnnnnnnnnnnnnnnnnnnnnnnnnnnnnnnnnnnnnnnnnnnnnnnnnnnnnnnnnnnnnnnnnnnnnnnnnnnnnnnnnnnnnnnnnnnnnnnnnnnnnnnnnnnnnnnnnnnnnnnnnnnnnnnnnnnnnnnnnnnnnnnnnnnnnnnnnnnnnnnnnnnnnnnnnnnnnnnnnnnnnnnnnnnnnnnnnnnnnnnnnnnnnnnnnnnnnnnnnnnnnnnnnnnnnnnnnnnnnnnnnnnnnnnnnnnnnnnnnnnnnnnnnnnnnnnnnnnnnnnnnnnnnnnnnnnnnnnnnnnnnnnnnnnnnnnnnnnnnnnnnnnnnnnnnnnnnnnnnnnnnnnnnnnnnnnnnnnnnnnnnnnnnnnnnnnnnnnnnnnnnnnnnnnnnnnnnnnnnnnnnnnnnnnnnnnnnnnnnnnnnnnnnnnnnnnnnnnnnnnnnnnnnnnnnnnnnnnnnnnnnnnnnnnnnnnnnnnnnnnnnnnnnnnnnnnnnnnnnnnnnnnnnnnnnnnnnnnnnnnnnnnnnnnnnnnnnnnnnnnnnnnnnnnnnnnnnnnnnnnnnnnnnnnnnnnnnnnnnnnnnnnnnnnnnnnnnnnnnnnnnnnnnnnnnnnnnnnnnnnnnnnnnnnnnnnnnnnnnnnnnnnnnnnnnnnnnnnnnnnnnnnnnnnnnnnnnnnnnnnnnnnnnnnnnnnnnnnnnnnnnnnnnnnnnnnnnnnnnnnnnnnnnnnnnnnnnnnnnnnnnnnnnnnnnnnnnnnnnnnnnnnnnnnnnnnnnnnnnnnnnnnnnnnnnnnnnnnnnnnnnnnnnnnnnnnnnnnnnnnnnnnnnnnnnnnnnnnnnnnnnnnnnnnnnnnnnnnnnnnnnnnnnnnnnnnnnnnnnnnnnnnnnnnnnnnnnnnnnnnnnnnnnnnnnnnnnnnnnnnnnnnnnnnnnnnnnnnnnnnnnnnnnnnnnnnnnnnnnnnnnnnnnnnnnnnnnnnnnnnnnnnnnnnnnnnnnnnnnnnnnnnnnnnnnnnnnnnnnnnnnnnnnnnnnnnnnnnnnnnnnnnnnnnnnnnnnnnnnnnnnnnnnnnnnnnnnnnnnnnnnnnnnnnnnnnnnnnnnnnnnnnnnnnnnnnnnnnnnnnnnnnnnnnnnnnnnnnnnnnnnnnnnnnnnnnnnnnnnnnnnnnnnnnnnnnnnnnnnnnnnnnnnnnnnnnnnnnnnnnnnnnnnnnnnnnnnnnnnnnnnnnnnnnnnnnnnnnnnnnnnnnnnnnnnnnnnnnnnnnnnnnnnnnnnnnnnnnnnnnnnnnnnnnnnnnnnnnnnnnnnnnnnnnnnnnnnnnnnnnnnnnnnnnnnnnnnnnnnnnnnnnnnnnnnnnnnnnnnnnnnnnnnnnnnnnnnnnnnnnnnnnnnnnnnnnnnnnnnnnnnnnnnnnnnnnnnnnnnnnnnnnnnnnnnnnnnnnnnnnnnnnnnnnnnnnnnnnnnnnnnnnnnnnnnnnnnnnnnnnnnnnnnnnnnnnnnnnnnnnnnnnnnnnnnnnnnnnnnnnnnnnnnnnnnnnnnnnnnnnnnnnnnnnnnnnnnnnnnnnnnnnnnnnnnnnnnnnnnnnnnnnnnnnnnnnnnnnnnnnnnnnnnnnnnnnnnnnnnnnnnnnnnnnnnnnnnnnnnnnnnnnnnnnnnnnnnnnnnnnnnnnnnnnnnnnnnnnnnnnnnnnnnnnnnnnnnnnnnnnnnnnnnnnnnnnnnnnnnnnnnnnnnnnnnnnnnnnnnnnnnnnnnnnnnnnnnnnnnnnnnnnnnnnnnnnnnnnnnnnnnnnnnnnnnnnnnnnnnnnnnnnnnnnnnnnnnnnnnnnnnnnnnnnnnnnnnnnnnnnnnnnnnnnnnnnnnnnnnnnnnnnnnnnnnnnnnnnnnnnnnnnnnnnnnnnnnnnnnnnnnnnnnnnnnnnnnnnnnnnnnnnnnnnnnnnnnnnnnnnnnnnnnnnnnnnnnnnnnnnnnnnnnnnnnnnnnnnnnnnnnnnnnnnnnnnnnnnnnnnnnnnnnnnnnnnnnnnnnnnnnnnnnnnnnnnnnnnnnnnnnnnnnnnnnnnnnnnnnnnnnnnnnnnnnnnnnnnnnnnnnnnnnnnnnnnnnnnnnnnnnnnnnnnnnnnnnnnnnnnnnnnnnnnnnnnnnnnnnnnnnnnnnnnnnnnnnnnnnnnnnnnnnnnnnnnnnnnnnnnnnnnnnnnnnnnnnnnnnnnnnnnnnnnnnnnnnnnnnnnnnnnnnnnnnnnnnnnnnnnnnnnnnnnnnnnnnnnnnnnnnnnnnnnnnnnnnnnnnnnnnnnnnnnnnnnnnnnnnnnnnnnnnnnnnnnnnnnnnnnnnnnnnnnnnnnnnnnnnnnnnnnnnnnnnnnnnnnnnnnnnnnnnnnnnnnnnnnnnnnnnnnnnnnnnnnnnnnnnnnnnnnnnnnnnnnnnnnnnnnnnnnnnnnnnnnnnnnnnnnnnnnnnnnnnnnnnnnnnnnnnnnnnnnnnnnnnnnnnnnnnnnnnnnnnnnnnnnnnnnnnnnnnnnnnnnnnnnnnnnnnnnnnnnnnnnnnnnnnnnnnnnnnnnnnnnnnnnnnnnnnnnnnnnnnnnnnnnnnnnnnnnnnnnnnnnnnnnnnnnnnnnnnnnnnnnnnnnnnnnnnnnnnnnnnnnnnnnnnnnnnnnnnnnnnnnnnnnnnnnnnnnnnnnnnnnnnnnnnnnnnnnnnnnnnnnnnnnnnnnnnnnnnnnnnnnnnnnnnnnnnnnnnnnnnnnnnnnnnnnnnnnnnnnnnnnnnnnnnnnnnnnnnnnnnnnnnnnnnnnnnnnnnnnnnnnnnnnnnnnnnnnnnnnnnnnnnnnnnnnnnnnnnnnnnnnnnnnnnnnnnnnnnnnnnnnnnnnnnnnnnnnnnnnnnnnnnnnnnnnnnnnnnnnnnnnnnnnnnnnnnnnnnnnnnnnnnnnnnnnnnnnnnnnnnnnnnnnnnnnnnnnnnnnnnnnnnnnnnnnnnnnnnnnnnnnnnnnnnnnnnnnnnnnnnnnnnnnnnnnnnnnnnnnnnnnnnnnnnnnnnnnnnnnnnnnnnnnnnnnnnnnnnnnnnnnnnnnnnnnnnnnnnnnnnnnnnnnnnnnnnnnnnnnnnnnnnnnnnnnnnnnnnnnnnnnnnnnnnnnnnnnnnnnnnnnnnnnnnnnnnnnnnnnnnnnnnnnnnnnnnnnnnnnnnnnnnnnnnnnnnnnnnnnnnnnnnnnnnnnnnnnnnnnnnnnnnnnnnnnnnnnnnnnnnnnnnnnnnnnnnnnnnnnnnnnnnnnnnnnnnnnnnnnnnnnnnnnnnnnnnnnnnnnnnnnnnnnnnnnnnnnnnnnnnnnnnnnnnnnnnnnnnnnnnnnnnnnnnnnnnnnnnnnnnnnnnnnnnnnnnnnnnnnnnnnnnnnnnnnnnnnnnnnnnnnnnnnnnnnnnnnnnnnnnnnnnnnnnnnnnnnnnnnnnnnnnnnnnnnnnnnnnnnnnnnnnnnnnnnnnnnnnnnnnnnnnnnnnnnnnnnnnnnnnnnnnnnnnnnnnnnnnnnnnnnnnnnnnnnnnnnnnnnnnnnnnnnnnnnnnnnnnnnnnnnnnnnnnnnnnnnnnnnnnnnnnnnnnnnnnnnnnnnnnnnnnnnnnnnnnnnnnnnnnnnnnnnnnnnnnnnnnnnnnnnnnnnnnnnnnnnnnnnnnnnnnnnnnnnnnnnnnnnnnnnnnnnnnnnnnnnnnnnnnnnnnnnnnnnnnnnnnnnnnnnnnnnnnnnnnnnnnnnnnnnnnnnnnnnnnnnnnnnnnnnnnnnnnnnnnnnnnnnnnnnnnnnnnnnnnnnnnnnnnnnnnnnnnnnnnnnnnnnnnnnnnnnnnnnnnnnnnnnnnnnnnnnnnnnnnnnnnnnnnnnnnnnnnnnnnnnnnnnnnnnnnnnnnnnnnnnnnnnnnnnnnnnnnnnnnnnnnnnnnnnnnnnnnnnnnnnnnnnnnnnnnnnnnnnnnnnnnnnnnnnnnnnnnnnnnnnnnnnnnnnnnnnnnnnnnnnnnnnnnnnnnnnnnnnnnnnnnnnnnnnnnnnnnnnnnnnnnnnnnnnnnnnnnnnnnnnnnnnnnnnnnnnnnnnnnnnnnnnnnnnnnnnnnnnnnnnnnnnnnnnnnnnnnnnnnnnnnnnnnnnnnnnnnnnnnnnnnnnnnnnnnnnnnnnnnnnnnnnnnnnnnnnnnnnnnnnnnnnnnnnnnnnnnnnnnnnnnnnnnnnnnnnnnnnnnnnnnnnnnnnnnnnnnnnnnnnnnnnnnnnnnnnnnnnnnnnnnnnnnnnnnnnnnnnnnnnnnnnnnnnnnnnnnnnnnnnnnnnnnnnnnnnnnnnnnnnnnnnnnnnnnnnnnnnnnnnnnnnnnnnnnnnnnnnnnnnnnnnnnnnnnnnnnnnnnnnnnnnnnnnnnnnnnnnnnnnnnnnnnnnnnnnnnnnnnnnnnnnnnnnnnnnnnnnnnnnnnnnnnnnnnnnnnnnnnnnnnnnnnnnnnnnnnnnnnnnnnnnnnnnnnnnnnnnnnnnnnnnnnnnnnnnnnnnnnnnnnnnnnnnnnnnnnnnnnnnnnnnnnnnnnnnnnnnnnnnnnnnnnnnnnnnnnnnnnnnnnnnnnnnnnnnnnnnnnnnnnnnnnnnnnnnnnnnnnnnnnnnnnnnnnnnnnnnnnnnnnnnnnnnnnnnnnnnnnnnnnnnnnnnnnnnnnnnnnnnnnnnnnnnnnnnnnnnnnnnnnnnnnnnnnnnnnnnnnnnnnnnnnnnnnnnnnnnnnnnnnnnnnnnnnnnnnnnnnnnnnnnnnnnnnnnnnnnnnnnnnnnnnnnnnnnnnnnnnnnnnnnnnnnnnnnnnnnnnnnnnnnnnnnnnnnnnnnnnnnnnnnnnnnnnnnnnnnnnnnnnnnnnnnnnnnnnnnnnnnnnnnnnnnnnnnnnnnnnnnnnnnnnnnnnnnnnnnnnnnnnnnnnnnnnnnnnnnnnnnnnnnnnnnnnnnnnnnnnnnnnnnnnnnnnnnnnnnnnnnnnnnnnnnnnnnnnnnnnnnnnnnnnnnnnnnnnnnnnnnnnnnnnnnnnnnnnnnnnnnnnnnnnnnnnnnnnnnnnnnnnnnnnnnnnnnnnnnnnnnnnnnnnnnnnnnnnnnnnnnnnnnnnnnnnnnnnnnnnnnnnnnnnnnnnnnnnnnnnnnnnnnnnnnnnnnnnnnnnnnnnnnnnnnnnnnnnnnnnnnnnnnnnnnnnnnnnnnnnnnnnnnnnnnnnnnnnnnnnnnnnnnnnnnnnnnnnnnnnnnnnnnnnnnnnnnnnnnnnnnnnnnnnnnnnnnnnnnnnnnnnnnnnnnnnnnnnnnnnnnnnnnnnnnnnnnnnnnnnnnnnnnnnnnnnnnnnnnnnnnnnnnnnnnnnnnnnnnnnnnnnnnnnnnnnnnnnnnnnnnnnnnnnnnnnnnnnnnnnnnnnnnnnnnnnnnnnnnnnnnnnnnnnnnnnnnnnnnnnnnnnnnnnnnnnnnnnnnnnnnnnnnnnnnnnnnnnnnnnnnnnnnnnnnnnnnnnnnnnnnnnnnnnnnnnnnnnnnnnnnnnnnnnnnnnnnnnnnnnnnnnnnnnnnnnnnnnnnnnnnnnnnnnnnnnnnnnnnnnnnnnnnnnnnnnnnnnnnnnnnnnnnnnnnnnnnnnnnnnnnnnnnnnnnnnnnnnnnnnnnnnnnnnnnnnnnnnnnnnnnnnnnnnnnnnnnnnnnnnnnnnnnnnnnnnnnnnnnnnnnnnnnnnnnnnnnnnnnnnnnnnnnnnnnnnnnnnnnnnnnnnnnnnnnnnnnnnnnnnnnnnnnnnnnnnnnnnnnnnnnnnnnnnnnnnnnnnnnnnnnnnnnnnnnnnnnnnnnnnnnnnnnnnnnnnnnnnnnnnnnnnnnnnnnnnnnnnnnnnnnnnnnnnnnnnnnnnnnnnnnnnnnnnnnnnnnnnnnnnnnnnnnnnnnnnnnnnnnnnnnnnnnnnnnnnnnnnnnnnnnnnnnnnnnnnnnnnnnnnnnnnnnnnnnnnnnnnnnnnnnnnnnnnnnnnnnnnnnnnnnnnnnnnnnnnnnnnnnnnnnnnnnnnnnnnnnnnnnnnnnnnnnnnnnnnnnnnnnnnnnnnnnnnnnnnnnnnnnnnnnnnnnnnnnnnnnnnnnnnnnnnnnnnnnnnnnnnnnnnnnnnnnnnnnnnnnnnnnnnnnnnnnnnnnnnnnnnnnnnnnnnnnnnnnnnnnnnnnnnnnnnnnnnnnnnnnnnnnnnnnnnnnnnnnnnnnnnnnnnnnnnnnnnnnnnnnnnnnnnnnnnnnnnnnnnnnnnnnnnnnnnnnnnnnnnnnnnnnnnnnnnnnnnnnnnnnnnnnnnnnnnnnnnnnnnnnnnnnnnnnnnnnnnnnnnnnnnnnnnnnnnnnnnnnnnnnnnnnnnnnnnnnnnnnnnnnnnnnnnnnnnnnnnnnnnnnnnnnnnnnnnnnnnnnnnnnnnnnnnnnnnnnnnnnnnnnnnnnnnnnnnnnnnnnnnnnnnnnnnnnnnnnnnnnnnnnnnnnnnnnnnnnnnnnnnnnnnnnnnnnnnnnnnnnnnnnnnnnnnnnnnnnnnnnnnnnnnnnnnnnnnnnnnnnnnnnnnnnnnnnnnnnnnnnnnnnnnnnnnnnnnnnnnnnnnnnnnnnnnnnnnnnnnnnnnnnnnnnnnnnnnnnnnnnnnnnnnnnnnnnnnnnnnnnnnnnnnnnnnnnnnnnnnnnnnnnnnnnnnnnnnnnnnnnnnnnnnnnnnnnnnnnnnnnnnnnnnnnnnnnnnnnnnnnnnnnnnnnnnnnnnnnnnnnnnnnnnnnnnnnnnnnnnnnnnnnnnnnnnnnnnnnnnnnnnnnnnnnnnnnnnnnnnnnnnnnnnnnnnnnnnnnnnnnnnnnnnnnnnnnnnnnnnnnnnnnnnnnnnnnnnnnnnnnnnnnnnnnnnnnnnnnnnnnnnnnnnnnnnnnnnnnnnnnnnnnnnnnnnnnnnnnnnnnnnnnnnnnnnnnnnnnnnnnnnnnnnnnnnnnnnnnnnnnnnnnnnnnnnnnnnnnnnnnnnnnnnnnnnnnnnnnnnnnnnnnnnnnnnnnnnnnnnnnnnnnnnnnnnnnnnnnnnnnnnnnnnnnnnnnnnnnnnnnnnnnnnnnnnnnnnnnnnnnnnnnnnnnnnnnnnnnnnnnnnnnnnnnnnnnnnnnnnnnnnnnnnnnnnnnnnnnnnnnnnnnnnnnnnnnnnnnnnnnnnnnnnnnnnnnnnnnnnnnnnnnnnnnnnnnnnnnnnnnnnnnnnnnnnnnnnnnnnnnnnnnnnnnnnnnnnnnnnnnnnnnnnnnnnnnnnnnnnnnnnnnnnnnnnnnnnnnnnnnnnnnnnnnnnnnnnnnnnnnnnnnnnnnnnnnnnnnnnnnnnnnnnnnnnnnnnnnnnnnnnnnnnnnnnnnnnnnnnnnnnnnnnnnnnnnnnnnnnnnnnnnnnnnnnnnnnnnnnnnnnnnnnnnnnnnnnnnnnnnnnnnnnnnnnnnnnnnnnnnnnnnnnnnnnnnnnnnnnnnnnnnnnnnnnnnnnnnnnnnnnnnnnnnnnnnnnnnnnnnnnnnnnnnnnnnnnnnnnnnnnnnnnnnnnnnnnnnnnnnnnnnnnnnnnnnnnnnnnnnnnnnnnnnnnnnnnnnnnnnnnnnnnnnnnnnnnnnnnnnnnnnnnnnnnnnnnnnnnnnnnnnnnnnnnnnnnnnnnnnnnnnnnnnnnnnnnnnnnnnnnnnnnnnnnnnnnnnnnnnnnnnnnnnnnnnnnnnnnnnnnnnnnnnnnnnnnnnnnnnnnnnnnnnnnnnnnnnnnnnnnnnnnnnnnnnnnnnnnnnnnnnnnnnnnnnnnnnnnnnnnnnnnnnnnnnnnnnnnnnnnnnnnnnnnnnnnnnnnnnnnnnnnnnnnnnnnnnnnnnnnnnnnnnnnnnnnnnnnnnnnnnnnnnnnnnnnnnnnnnnnnnnnnnnnnnnnnnnnnnnnnnnnnnnnnnnnnnnnnnnnnnnnnnnnnnnnnnnnnnnnnnnnnnnnnnnnnnnnnnnnnnnnnnnnnnnnnnnnnnnnnnnnnnnnnnnnnnnnnnnnnnnnnnnnnnnnnnnnnnnnnnnnnnnnnnnnnnnnnnnnnnnnnnnnnnnnnnnnnnnnnnnnnnnnnnnnnnnnnnnnnnnnnnnnnnnnnnnnnnnnnnnnnnnnnnnnnnnnnnnnnnnnnnnnnnnnnnnnnnnnnnnnnnnnnnnnnnnnnnnnnnnnnnnnnnnnnnnnnnnnnnnnnnnnnnnnnnnnnnnnnnnnnnnnnnnnnnnnnnnnnnnnnnnnnnnnnnnnnnnnnnnnnnnnnnnnnnnnnnnnnnnnnnnnnnnnnnnnnnnnnnnnnnnnnnnnnnnnnnnnnnnnnnnnnnnnnnnnnnnnnnnnnnnnnnnnnnnnnnnnnnnnnnnnnnnnnnnnnnnnnnnnnnnnnnnnnnnnnnnnnnnnnnnnnnnnnnnnnnnnnnnnnnnnnnnnnnnnnnnnnnnnnnnnnnnnnnnnnnnnnnnnnnnnnnnnnnnnnnnnnnnnnnnnnnnnnnnnnnnnnnnnnnnnnnnnnnnnnnnnnnnnnnnnnnnnnnnnnnnnnnnnnnnnnnnnnnnnnnnnnnnnnnnnnnnnnnnnnnnnnnnnnnnnnnnnnnnnnnnnnnnnnnnnnnnnnnnnnnnnnnnnnnnnnnnnnnnnnnnnnnnnnnnnnnnnnnnnnnnnnnnnnnnnnnnnnnnnnnnnnnnnnnnnnnnnnnnnnnnnnnnnnnnnnnnnnnnnnnnnnnnnnnnnnnnnnnnnnnnnnnnnnnnnnnnnnnnnnnnnnnnnnnnnnnnnnnnnnnnnnnnnnnnnnnnnnnnnnnnnnnnnnnnnnnnnnnnnnnnnnnnnnnnnnnnnnnnnnnnnnnnnnnnnnnnnnnnnnnnnnnnnnnnnnnnnnnnnnnnnnnnnnnnnnnnnnnnnnnnnnnnnnnnnnnnnnnnnnnnnnnnnnnnnnnnnnnnnnnnnnnnnnnnnnnnnnnnnnnnnnnnnnnnnnnnnnnnnnnnnnnnnnnnnnnnnnnnnnnnnnnnnnnnnnnnnnnnnnnnnnnnnnnnnnnnnnnnnnnnnnnnnnnnnnnnnnnnnnnnnnnnnnnnnnnnnnnnnnnnnnnnnnnnnnnnnnnnnnnnnnnnnnnnnnnnnnnnnnnnnnnnnnnnnnnnnnnnnnnnnnnnnnnnnnnnnnnnnnnnnnnnnnnnnnnnnnnnnnnnnnnnnnnnnnnnnnnnnnnnnnnnnnnnnnnnnnnnnnnnnnnnnnnnnnnnnnnnnnnnnnnnnnnnnnnnnnnnnnnnnnnnnnnnnnnnnnnnnnnnnnnnnnnnnnnnnnnnnnnnnnnnnnnnnnnnnnnnnnnnnnnnnnnnnnnnnnnnnnnnnnnnnnnnnnnnnnnnnnnnnnnnnnnnnnnnnnnnnnnnnnnnnnnnnnnnnnnnnnnnnnnnnnnnnnnnnnnnnnnnnnnnnnnnnnnnnnnnnnnnnnnnnnnnnnnnnnnnnnnnnnnnnnnnnnnnnnnnnnnnnnnnnnnnnnnnnnnnnnnnnnnnnnnnnnnnnnnnnnnnnnnnnnnnnnnnnnnnnnnnnnnnnnnnnnnnnnnnnnnnnnnnnnnnnnnnnnnnnnnnnnnnnnnnnnnnnnnnnnnnnnnnnnnnnnnnnnnnnnnnnnnnnnnnnnnnnnnnnnnnnnnnnnnnnnnnnnnnnnnnnnnnnnnnnnnnnnnnnnnnnnnnnnnnnnnnnnnnnnnnnnnnnnnnnnnnnnnnnnnnnnnnnnnnnnnnnnnnnnnnnnnnnnnnnnnnnnnnnnnnnnnnnnnnnnnnnnnnnnnnnnnnnnnnnnnnnnnnnnnnnnnnnnnnnnnnnnnnnnnnnnnnnnnnnnnnnnnnnnnnnnnnnnnnnnnnnnnnnnnnnnnnnnnnnnnnnnnnnnnnnnnnnnnnnnnnnnnnnnnnnnnnnnnnnnnnnnnnnnnnnnnnnnnnnnnnnnnnnnnnnnnnnnnnnnnnnnnnnnnnnnnnnnnnnnnnnnnnnnnnnnnnnnnnnnnnnnnnnnnnnnnnnnnnnnnnnnnnnnnnnnnnnnnnnnnnnnnnnnnnnnnnnnnnnnnnnnnnnnnnnnnnnnnnnnnnnnnnnnnnnnnnnnnnnnnnnnnnnnnnnnnnnnnnnnnnnnnnnnnnnnnnnnnnnnnnnnnnnnnnnnnnnnnnnnnnnnnnnnnnnnnnnnnnnnnnnnnnnnnnnnnnnnnnnnnnnnnnnnnnnnnnnnnnnnnnnnnnnnnnnnnnnnnnnnnnnnnnnnnnnnnnnnnnnnnnnnnnnnnnnnnnnnnnnnnnnnnnnnnnnnnnnnnnnnnnnnnnnnnnnnnnnnnnnnnnnnnnnnnnnnnnnnnnnnnnnnnnnnnnnnnnnnnnnnnnnnnnnnnnnnnnnnnnnnnnnnnnnnnnnnnnnnnnnnnnnnnnnnnnnnnnnnnnnnnnnnnnnnnnnnnnnnnnnnnnnnnnnnnnnnnnnnnnnnnnnnnnnnnnnnnnnnnnnnnnnnnnnnnnnnnnnnnnnnnnnnnnnnnnnnnnnnnnnnnnnnnnnnnnnnnnnnnnnnnnnnnnnnnnnnnnnnnnnnnnnnnnnnnnnnnnnnnnnnnnnnnnnnnnnnnnnnnnnnnnnnnnnnnnnnnnnnnnnnnnnnnnnnnnnnnnnnnnnnnnnnnnnnnnnnnnnnnnnnnnnnnnnnnnnnnnnnnnnnnnnnnnnnnnnnnnnnnnnnnnnnnnnnnnnnnnnnnnnnnnnnnnnnnnnnnnnnnnnnnnnnnnnnnnnnnnnnnnnnnnnnnnnnnnnnnnnnnnnnnnnnnnnnnnnnnnnnnnnnnnnnnnnnnnnnnnnnnnnnnnnnnnnnnnnnnnnnnnnnnnnnnnnnnnnnnnnnnnnnnnnnnnnnnnnnnnnnnnnnnnnnnnnnnnnnnnnnnnnnnnnnnnnnnnnnnnnnnnnnnnnnnnnnnnnnnnnnnnnnnnnnnnnnnnnnnnnnnnnnnnnnnnnnnnnnnnnnnnnnnnnnnnnnnnnnnnnnnnnnnnnnnnnnnnnnnnnnnnnnnnnnnnnnnnnnnnnnnnnnnnnnnnnnnnnnnnnnnnnnnnnnnnnnnnnnnnnnnnnnnnnnnnnnnnnnnnnnnnnnnnnnnnnnnnnnnnnnnnnnnnnnnnnnnnnnnnnnnnnnnnnnnnnnnnnnnnnnnnnnnnnnnnnnnnnnnnnnnnnnnnnnnnnnnnnnnnnnnnnnnnnnnnnnnnnnnnnnnnnnnnnnnnnnnnnnnnnnnnnnnnnnnnnnnnnnnnnnnnnnnnnnnnnnnnnnnnnnnnnnnnnnnnnnnnnnnnnnnnnnnnnnnnnnnnnnnnnnnnnnnnnnnnnnnnnnnnnnnnnnnnnnnnnnnnnnnnnnnnnnnnnnnnnnnnnnnnnnnnnnnnnnnnnnnnnnnnnnnnnnnnnnnnnnnnnnnnnnnnnnnnnnnnnnnnnnnnnnnnnnnnnnnnnnnnnnnnnnnnnnnnnnnnnnnnnnnnnnnnnnnnnnnnnnnnnnnnnnnnnnnnnnnnnnnnnnnnnnnnnnnnnnnnnnnnnnnnnnnnnnnnnnnnnnnnnnnnnnnnnnnnnnnnnnnnnnnnnnnnnnnnnnnnnnnnnnnnnnnnnnnnnnnnnnnnnnnnnnnnnnnnnnnnnnnnnnnnnnnnnnnnnnnnnnnnnnnnnnnnnnnnnnnnnnnnnnnnnnnnnnnnnnnnnnnnnnnnnnnnnnnnnnnnnnnnnnnnnnnnnnnnnnnnnnnnnnnnnnnnnnnnnnnnnnnnnnnnnnnnnnnnnnnnnnnnnnnnnnnnnnnnnnnnnnnnnnnnnnnnnnnnnnnnnnnnnnnnnnnnnnnnnnnnnnnnnnnnnnnnnnnnnnnnnnnnnnnnnnnnnnnnnnnnnnnnnnnnnnnnnnnnnnnnnnnnnnnnnnnnnnnnnnnnnnnnnnnnnnnnnnnnnnnnnnnnnnnnnnnnnnnnnnnnnnnnnnnnnnnnnnnnnnnnnnnnnnnnnnnnnnnnnnnnnnnnnnnnnnnnnnnnnnnnnnnnnnnnnnnnnnnnnnnnnnnnnnnnnnnnnnnnnnnnnnnnnnnnnnnnnnnnnnnnnnnnnnnnnnnnnnnnnnnnnnnnnnnnnnnnnnnnnnnnnnnnnnnnnnnnnnnnnnnnnnnnnnnnnnnnnnnnnnnnnnnnnnnnnnnnnnnnnnnnnnnnnnnnnnnnnnnnnnnnnnnnnnnnnnnnnnnnnnnnnnnnnnnnnnnnnnnnnnnnnnnnnnnnnnnnnnnnnnnnnnnnnnnnnnnnnnnnnnnnnnnnnnnnnnnnnnnnnnnnnnnnnnnnnnnnnnnnnnnnnnnnnnnnnnnnnnnnnnnnnnnnnnnnnnnnnnnnnnnnnnnnnnnnnnnnnnnnnnnnnnnnnnnnnnnnnnnnnnnnnnnnnnnnnnnnnnnnnnnnnnnnnnnnnnnnnnnnnnnnnnnnnnnnnnnnnnnnnnnnnnnnnnnnnnnnnnnnnnnnnnnnnnnnnnnnnnnnnnnnnnnnnnnnnnnnnnnnnnnnnnnnnnnnnnnnnnnnnnnnnnnnnnnnnnnnnnnnnnnnnnnnnnnnnnnnnnnnnnnnnnnnnnnnnnnnnnnnnnnnnnnnnnnnnnnnnnnnnnnnnnnnnnnnnnnnnnnnnnnnnnnnnnnnnnnnnnnnnnnnnnnnnnnnnnnnnnnnnnnnnnnnnnnnnnnnnnnnnnnnnnnnnnnnnnnnnnnnnnnnnnnnnnnnnnnnnnnnnnnnnnnnnnnnnnnnnnnnnnnnnnnnnnnnnnnnnnnnnnnnnnnnnnnnnnnnnnnnnnnnnnnnnnnnnnnnnnnnnnnnnnnnnnnnnnnnnnnnnnnnnnnnnnnnnnnnnnnnnnnnnnnnnnnnnnnnnnnnnnnnnnnnnnnnnnnnnnnnnnnnnnnnnnnnnnnnnnnnnnnnnnnnnnnnnnnnnnnnnnnnnnnnnnnnnnnnnnnnnnnnnnnnnnnnnnnnnnnnnnnnnnnnnnnnnnnnnnnnnnnnnnnnnnnnnnnnnnnnnnnnnnnnnnnnnnnnnnnnnnnnnnnnnnnnnnnnnnnnnnnnnnnnnnnnnnnnnnnnnnnnnnnnnnnnnnnnnnnnnnnnnnnnnnnnnnnnnnnnnnnnnnnnnnnnnnnnnnnnnnnnnnnnnnnnnnnnnnnnnnnnnnnnnnnnnnnnnnnnnnnnnnnnnnnnnnnnnnnnnnnnnnnnnnnnnnnnnnnnnnnnnnnnnnnnnnnnnnnnnnnnnnnnnnnnnnnnnnnnnnnnnnnnnnnnnnnnnnnnnnnnnnnnnnnnnnnnnnnnnnnnnnnnnnnnnnnnnnnnnnnnnnnnnnnnnnnnnnnnnnnnnnnnnnnnnnnnnnnnnnnnnnnnnnnnnnnnnnnnnnnnnnnnnnnnnnnnnnnnnnnnnnnnnnnnnnnnnnnnnnnnnnnnnnnnnnnnnnnnnnnnnnnnnnnnnnnnnnnnnnnnnnnnnnnnnnnnnnnnnnnnnnnnnnnnnnnnnnnnnnnnnnnnnnnnnnnnnnnnnnnnnnnnnnnnnnnnnnnnnnnnnnnnnnnnnnnnnnnnnnnnnnnnnnnnnnnnnnnnnnnnnnnnnnnnnnnnnnnnnnnnnnnnnnnnnnnnnnnnnnnnnnnnnnnnnnnnnnnnnnnnnnnnnnnnnnnnnnnnnnnnnnnnnnnnnnnnnnnnnnnnnnnnnnnnnnnnnnnnnnnnnnnnnnnnnnnnnnnnnnnnnnnnnnnnnnnnnnnnnnnnnnnnnnnnnnnnnnnnnnnnnnnnnnnnnnnnnnnnnnnnnnnnnnnnnnnnnnnnnnnnnnnnnnnnnnnnnnnnnnnnnnnnnnnnnnnnnnnnnnnnnnnnnnnnnnnnnnnnnnnnnnnnnnnnnnnnnnnnnnnnnnnnnnnnnnnnnnnnnnnnnnnnnnnnnnnnnnnnnnnnnnnnnnnnnnnnnnnnnnnnnnnnnnnnnnnnnnnnnnnnnnnnnnnnnnnnnnnnnnnnnnnnnnnnnnnnnnnnnnnnnnnnnnnnnnnnnnnnnnnnnnnnnnnnnnnnnnnnnnnnnnnnnnnnnnnnnnnnnnnnnnnnnnnnnnnnnnnnnnnnnnnnnnnnnnnnnnnnnnnnnnnnnnnnnnnnnnnnnnnnnnnnnnnnnnnnnnnnnnnnnnnnnnnnnnnnnnnnnnnnnnnnnnnnnnnnnnnnnnnnnnnnnnnnnnnnnnnnnnnnnnnnnnnnnnnnnnnnnnnnnnnnnnnnnnnnnnnnnnnnnnnnnnnnnnnnnnnnnnnnnnnnnnnnnnnnnnnnnnnnnnnnnnnnnnnnnnnnnnnnnnnnnnnnnnnnnnnnnnnnnnnnnnnnnnnnnnnnnnnnnnnnnnnnnnnnnnnnnnnnnnnnnnnnnnnnnnnnnnnnnnnnnnnnnnnnnnnnnnnnnnnnnnnnnnnnnnnnnnnnnnnnnnnnnnnnnnnnnnnnnnnnnnnnnnnnnnnnnnnnnnnnnnnnnnnnnnnnnnnnnnnnnnnnnnnnnnnnnnnnnnnnnnnnnnnnnnnnnnnnnnnnnnnnnnnnnnnnnnnnnnnnnnnnnnnnnnnnnnnnnnnnnnnnnnnnnnnnnnnnnnnnnnnnnnnnnnnnnnnnnnnnnnnnnnnnnnnnnnnnnnnnnnnnnnnnnnnnnnnnnnnnnnnnnnnnnnnnnnnnnnnnnnnnnnnnnnnnnnnnnnnnnnnnnnnnnnnnnnnnnnnnnnnnnnnnnnnnnnnnnnnnnnnnnnnnnnnnnnnnnnnnnnnnnnnnnnnnnnnnnnnnnnnnnnnnnnnnnnnnnnnnnnnnnnnnnnnnnnnnnnnnnnnnnnnnnnnnnnnnnnnnnnnnnnnnnnnnnnnnnnnnnnnnnnnnnnnnnnnnnnnnnnnnnnnnnnnnnnnnnnnnnnnnnnnnnnnnnnnnnnnnnnnnnnnnnnnnnnnnnnnnnnnnnnnnnnnnnnnnnnnnnnnnnnnnnnnnnnnnnnnnnnnnnnnnnnnnnnnnnnnnnnnnnnnnnnnnnnnnnnnnnnnnnnnnnnnnnnnnnnnnnnnnnnnnnnnnnnnnnnnnnnnnnnnnnnnnnnnnnnnnnnnnnnnnnnnnnnnnnnnnnnnnnnnnnnnnnnnnnnnnnnnnnnnnnnnnnnnnnnnnnnnnnnnnnnnnnnnnnnnnnnnnnnnnnnnnnnnnnnnnnnnnnnnnnnnnnnnnnnnnnnnnnnnnnnnnnnnnnnnnnnnnnnnnnnnnnnnnnnnnnnnnnnnnnnnnnnnnnnnnnnnnnnnnnnnnnnnnnnnnnnnnnnnnnnnnnnnnnnnnnnnnnnnnnnnnnnnnnnnnnnnnnnnnnnnnnnnnnnnnnnnnnnnnnnnnnnnnnnnnnnnnnnnnnnnnnnnnnnnnnnnnnnnnnnnnnnnnnnnnnnnnnnnnnnnnnnnnnnnnnnnnnnnnnnnnnnnnnnnnnnnnnnnnnnnnnnnnnnnnnnnnnnnnnnnnnnnnnnnnnnnnnnnnnnnnnnnnnnnnnnnnnnnnnnnnnnnnnnnnnnnnnnnnnnnnnnnnnnnnnnnnnnnnnnnnnnnnnnnnnnnnnnnnnnnnnnnnnnnnnnnnnnnnnnnnnnnnnnnnnnnnnnnnnnnnnnnnnnnnnnnnnnnnnnnnnnnnnnnnnnnnnnnnnnnnnnnnnnnnnnnnnnnnnnnnnnnnnnnnnnnnnnnnnnnnnnnnnnnnnnnnnnnnnnnnnnnnnnnnnnnnnnnnnnnnnnnnnnnnnnnnnnnnnnnnnnnnnnnnnnnnnnnnnnnnnnnnnnnnnnnnnnnnnnnnnnnnnnnnnnnnnnnnnnnnnnnnnnnnnnnnnnnnnnnnnnnnnnnnnnnnnnnnnnnnnnnnnnnnnnnnnnnnnnnnnnnnnnnnnnnnnnnnnnnnnnnnnnnnnnnnnnnnnnnnnnnnnnnnnnnnnnnnnnnnnnnnnnnnnnnnnnnnnnnnnnnnnnnnnnnnnnnnnnnnnnnnnnnnnnnnnnnnnnnnnnnnnnnnnnnnnnnnnnnnnnnnnnnnnnnnnnnnnnnnnnnnnnnnnnnnnnnnnnnnnnnnnnnnnnnnnnnnnnnnnnnnnnnnnnnnnnnnnnnnnnnnnnnnnnnnnnnnnnnnnnnnnnnnnnnnnnnnnnnnnnnnnnnnnnnnnnnnnnnnnnnnnnnnnnnnnnnnnnnnnnnnnnnnnnnnnnnnnnnnnnnnnnnnnnnnnnnnnnnnnnnnnnnnnnnnnnnnnnnnnnnnnnnnnnnnnnnnnnnnnnnnnnnnnnnnnnnnnnnnnnnnnnnnnnnnnnnnnnnnnnnnnnnnnnnnnnnnnnnnnnnnnnnnnnnnnnnnnnnnnnnnnnnnnnnnnnnnnnnnnnnnnnnnnnnnnnnnnnnnnnnnnnnnnnnnnnnnnnnnnnnnnnnnnnnnnnnnnnnnnnnnnnnnnnnnnnnnnnnnnnnnnnnnnnnnnnnnnnnnnnnnnnnnnnnnnnnnnnnnnnnnnnnnnnnnnnnnnnnnnnnnnnnnnnnnnnnnnnnnnnnnnnnnnnnnnnnnnnnnnnnnnnnnnnnnnnnnnnnnnnnnnnnnnnnnnnnnnnnnnnnnnnnnnnnnnnnnnnnnnnnnnnnnnnnnnnnnnnnnnnnnnnnnnnnnnnnnnnnnnnnnnnnnnnnnnnnnnnnnnnnnnnnnnnnnnnnnnnnnnnnnnnnnnnnnnnnnnnnnnnnnnnnnnnnnnnnnnnnnnnnnnnnnnnnnnnnnnnnnnnnnnnnnnnnnnnnnnnnnnnnnnnnnnnnnnnnnnnnnnnnnnnnnnnnnnnnnnnnnnnnnnnnnnnnnnnnnnnnnnnnnnnnnnnnnnnnnnnnnnnnnnnnnnnnnnnnnnnnnnnnnnnnnnnnnnnnnnnnnnnnnnnnnnnnnnnnnnnnnnnnnnnnnnnnnnnnnnnnnnnnnnnnnnnnnnnnnnnnnnnnnnnnnnnnnnnnnnnnnnnnnnnnnnnnnnnnnnnnnnnnnnnnnnnnnnnnnnnnnnnnnnnnnnnnnnnnnnnnnnnnnnnnnnnnnnnnnnnnnnnnnnnnnnnnnnnnnnnnnnnnnnnnnnnnnnnnnnnnnnnnnnnnnnnnnnnnnnnnnnnnnnnnnnnnnnnnnnnnnnnnnnnnnnnnnnnnnnnnnnnnnnnnnnnnnnnnnnnnnnnnnnnnnnnnnnnnnnnnnnnnnnnnnnnnnnnnnnnnnnnnnnnnnnnnnnnnnnnnnnnnnnnnnnnnnnnnnnnnnnnnnnnnnnnnnnnnnnnnnnnnnnnnnnnnnnnnnnnnnnnnnnnnnnnnnnnnnnnnnnnnnnnnnnnnnnnnnnnnnnnnnnnnnnnnnnnnnnnnnnnnnnnnnnnnnnnnnnnnnnnnnnnnnnnnnnnnnnnnnnnnnnnnnnnnnnnnnnnnnnnnnnnnnnnnnnnnnnnnnnnnnnnnnnnnnnnnnnnnnnnnnnnnnnnnnnnnnnnnnnnnnnnnnnnnnnnnnnnnnnnnnnnnnnnnnnnnnnnnnnnnnnnnnnnnnnnnnnnnnnnnnnnnnnnnnnnnnnnnnnnnnnnnnnnnnnnnnnnnnnnnnnnnnnnnnnnnnnnnnnnnnnnnnnnnnnnnnnnnnnnnnnnnnnnnnnnnnnnnnnnnnnnnnnnnnnnnnnnnnnnnnnnnnnnnnnnnnnnnnnnnnnnnnnnnnnnnnnnnnnnnnnnnnnnnnnnnnnnnnnnnnnnnnnnnnnnnnnnnnnnnnnnnnnnnnnnnnnnnnnnnnnnnnnnnnnnnnnnnnnnnnnnnnnnnnnnnnnnnnnnnnnnnnnnnnnnnnnnnnnnnnnnnnnnnnnnnnnnnnnnnnnnnnnnnnnnnnnnnnnnnnnnnnnnnnnnnnnnnnnnnnnnnnnnnnnnnnnnnnnnnnnnnnnnnnnnnnnnnnnnnnnnnnnnnnnnnnnnnnnnnnnnnnnnnnnnnnnnnnnnnnnnnnnnnnnnnnnnnnnnnnnnnnnnnnnnnnnnnnnnnnnnnnnnnnnnnnnnnnnnnnnnnnnnnnnnnnnnnnnnnnnnnnnnnnnnnnnnnnnnnnnnnnnnnnnnnnnnnnnnnnnnnnnnnnnnnnnnnnnnnnnnnnnnnnnnnnnnnnnnnnnnnnnnnnnnnnnnnnnnnnnnnnnnnnnnnnnnnnnnnnnnnnnnnnnnnnnnnnnnnnnnnnnnnnnnnnnnnnnnnnnnnnnnnnnnnnnnnnnnnnnnnnnnnnnnnnnnnnnnnnnnnnnnnnnnnnnnnnnnnnnnnnnnnnnnnnnnnnnnnnnnnnnnnnnnnnnnnnnnnnnnnnnnnnnnnnnnnnnnnnnnnnnnnnnnnnnnnnnnnnnnnnnnnnnnnnnnnnnnnnnnnnnnnnnnnnnnnnnnnnnnnnnnnnnnnnnnnnnnnnnnnnnnnnnnnnnnnnnnnnnnnnnnnnnnnnnnnnnnnnnnnnnnnnnnnnnnnnnnnnnnnnnnnnnnnnnnnnnnnnnnnnnnnnnnnnnnnnnnnnnnnnnnnnnnnnnnnnnnnnnnnnnnnnnnnnnnnnnnnnnnnnnnnnnnnnnnnnnnnnnnnnnnnnnnnnnnnnnnnnnnnnnnnnnnnnnnnnnnnnnnnnnnnnnnnnnnnnnnnnnnnnnnnnnnnnnnnnnnnnnnnnnnnnnnnnnnnnnnnnnnnnnnnnnnnnnnnnnnnnnnnnnnnnnnnnnnnnnnnnnnnnnnnnnnnnnnnnnnnnnnnnnnnnnnnnnnnnnnnnnnnnnnnnnnnnnnnnnnnnnnnnnnnnnnnnnnnnnnnnnnnnnnnnnnnnnnnnnnnnnnnnnnnnnnnnnnnnnnnnnnnnnnnnnnnnnnnnnnnnnnnnnnnnnnnnnnnnnnnnnnnnnnnnnnnnnnnnnnnnnnnnnnnnnnnnnnnnnnnnnnnnnnnnnnnnnnnnnnnnnnnnnnnnnnnnnnnnnnnnnnnnnnnnnnnnnnnnnnnnnnnnnnnnnnnnnnnnnnnnnnnnnnnnnnnnnnnnnnnnnnnnnnnnnnnnnnnnnnnnnnnnnnnnnnnnnnnnnnnnnnnnnnnnnnnnnnnnnnnnnnnnnnnnnnnnnnnnnnnnnnnnnnnnnnnnnnnnnnnnnnnnnnnnnnnnnnnnnnnnnnnnnnnnnnnnnnnnnnnnnnnnnnnnnnnnnnnnnnnnnnnnnnnnnnnnnnnnnnnnnnnnnnnnnnnnnnnnnnnnnnnnnnnnnnnnnnnnnnnnnnnnnnnnnnnnnnnnnnnnnnnnnnnnnnnnnnnnnnnnnnnnnnnnnnnnnnnnnnnnnnnnnnnnnnnnnnnnnnnnnnnnnnnnnnnnnnnnnnnnnnnnnnnnnnnnnnnnnnnnnnnnnnnnnnnnnnnnnnnnnnnnnnnnnnnnnnnnnnnnnnnnnnnnnnnnnnnnnnnnnnnnnnnnnnnnnnnnnnnnnnnnnnnnnnnnnnnnnnnnnnnnnnnnnnnnnnnnnnnnnnnnnnnnnnnnnnnnnnnnnnnnnnnnnnnnnnnnnnnnnnnnnnnnnnnnnnnnnnnnnnnnnnnnnnnnnnnnnnnnnnnnnnnnnnnnnnnnnnnnnnnnnnnnnnnnnnnnnnnnnnnnnnnnnnnnnnnnnnnnnnnnnnnnnnnnnnnnnnnnnnnnnnnnnnnnnnnnnnnnnnnnnnnnnnnnnnnnnnnnnnnnnnnnnnnnnnnnnnnnnnnnnnnnnnnnnnnnnnnnnnnnnnnnnnnnnnnnnnnnnnnnnnnnnnnnnnnnnnnnnnnnnnnnnnnnnnnnnnnnnnnnnnnnnnnnnnnnnnnnnnnnnnnnnnnnnnnnnnnnnnnnnnnnnnnnnnnnnnnnnnnnnnnnnnnnnnnnnnnnnnnnnnnnnnnnnnnnnnnnnnnnnnnnnnnnnnnnnnnnnnnnnnnnnnnnnnnnnnnnnnnnnnnnnnnnnnnnnnnnnnnnnnnnnnnnnnnnnnnnnnnnnnnnnnnnnnnnnnnnnnnnnnnnnnnnnnnnnnnnnnnnnnnnnnnnnnnnnnnnnnnnnnnnnnnnnnnnnnnnnnnnnnnnnnnnnnnnnnnnnnnnnnnnnnnnnnnnnnnnnnnnnnnnnnnnnnnnnnnnnnnnnnnnnnnnnnnnnnnnnnnnnnnnnnnnnnnnnnnnnnnnnnnnnnnnnnnnnnnnnnnnnnnnnnnnnnnnnnnnnnnnnnnnnnnnnnnnnnnnnnnnnnnnnnnnnnnnnnnnnnnnnnnnnnnnnnnnnnnnnnnnnnnnnnnnnnnnnnnnnnnnnnnnnnnnnnnnnnnnnnnnnnnnnnnnnnnnnnnnnnnnnnnnnnnnnnnnnnnnnnnnnnnnnnnnnnnnnnnnnnnnnnnnnnnnnnnnnnnnnnnnnnnnnnnnnnnnnnnnnnnnnnnnnnnnnnnnnnnnnnnnnnnnnnnnnnnnnnnnnnnnnnnnnnnnnnnnnnnnnnnnnnnnnnnnnnnnnnnnnnnnnnnnnnnnnnnnnnnnnnnnnnnnnnnnnnnnnnnnnnnnnnnnnnnnnnnnnnnnnnnnnnnnnnnnnnnnnnnnnnnnnnnnnnnnnnnnnnnnnnnnnnnnnnnnnnnnnnnnnnnnnnnnnnnnnnnnnnnnnnnnnnnnnnnnnnnnnnnnnnnnnnnnnnnnnnnnnnnnnnnnnnnnnnnnnnnnnnnnnnnnnnnnnnnnnnnnnnnnnnnnnnnnnnnnnnnnnnnnnnnnnnnnnnnnnnnnnnnnnnnnnnnnnnnnnnnnnnnnnnnnnnnnnnnnnnnnnnnnnnnnnnnnnnnnnnnnnnnnnnnnnnnnnnnnnnnnnnnnnnnnnnnnnnnnnnnnnnnnnnnnnnnnnnnnnnnnnnnnnnnnnnnnnnnnnnnnnnnnnnnnnnnnnnnnnnnnnnnnnnnnnnnnnnnnnnnnnnnnnnnnnnnnnnnnnnnnnnnnnnnnnnnnnnnnnnnnnnnnnnnnnnnnnnnnnnnnnnnnnnnnnnnnnnnnnnnnnnnnnnnnnnnnnnnnnnnnnnnnnnnnnnnnnnnnnnnnnnnnnnnnnnnnnnnnnnnnnnnnnnnnnnnnnnnnnnnnnnnnnnnnnnnnnnnnnnnnnnnnnnnnnnnnnnnnnnnnnnnnnnnnnnnnnnnnnnnnnnnnnnnnnnnnnnnnnnnnnnnnnnnnnnnnnnnnnnnnnnnnnnnnnnnnnnnnnnnnnnnnnnnnnnnnnnnnnnnnnnnnnnnnnnnnnnnnnnnnnnnnnnnnnnnnnnnnnnnnnnnnnnnnnnnnnnnnnnnnnnnnnnnnnnnnnnnnnnnnnnnnnnnnnnnnnnnnnnnnnnnnnnnnnnnnnnnnnnnnnnnnnnnnnnnnnnnnnnnnnnnnnnnnnnnnnnnnnnnnnnnnnnnnnnnnnnnnnnnnnnnnnnnnnnnnnnnnnnnnnnnnnnnnnnnnnnnnnnnnnnnnnnnnnnnnnnnnnnnnnnnnnnnnnnnnnnnnnnnnnnnnnnnnnnnnnnnnnnnnnnnnnnnnnnnnnnnnnnnnnnnnnnnnnnnnnnnnnnnnnnnnnnnnnnnnnnnnnnnnnnnnnnnnnnnnnnnnnnnnnnnnnnnnnnnnnnnnnnnnnnnnnnnnnnnnnnnnnnnnnnnnnnnnnnnnnnnnnnnnnnnnnnnnnnnnnnnnnnnnnnnnnnnnnnnnnnnnnnnnnnnnnnnnnnnnnnnnnnnnnnnnnnnnnnnnnnnnnnnnnnnnnnnnnnnnnnnnnnnnnnnnnnnnnnnnnnnnnnnnnnnnnnnnnnnnnnnnnnnnnnnnnnnnnnnnnnnnnnnnnnnnnnnnnnnnnnnnnnnnnnnnnnnnnnnnnnnnnnnnnnnnnnnnnnnnnnnnnnnnnnnnnnnnnnnnnnnnnnnnnnnnnnnnnnnnnnnnnnnnnnnnnnnnnnnnnnnnnnnnnnnnnnnnnnnnnnnnnnnnnnnnnnnnnnnnnnnnnnnnnnnnnnnnnnnnnnnnnnnnnnnnnnnnnnnnnnnnnnnnnnnnnnnnnnnnnnnnnnnnnnnnnnnnnnnnnnnnnnnnnnnnnnnnnnnnnnnnnnnnnnnnnnnnnnnnnnnnnnnnnnnnnnnnnnnnnnnnnnnnnnnnnnnnnnnnnnnnnnnnnnnnnnnnnnnnnnnnnnnnnnnnnnnnnnnnnnnnnnnnnnnnnnnnnnnnnnnnnnnnnnnnnnnnnnnnnnnnnnnnnnnnnnnnnnnnnnnnnnnnnnnnnnnnnnnnnnnnnnnnnnnnnnnnnnnnnnnnnnnnnnnnnnnnnnnnnnnnnnnnnnnnnnnnnnnnnnnnnnnnnnnnnnnnnnnnnnnnnnnnnnnnnnnnnnnnnnnnnnnnnnnnnnnnnnnnnnnnnnnnnnnnnnnnnnnnnnnnnnnnnnnnnnnnnnnnnnnnnnnnnnnnnnnnnnnnnnnnnnnnnnnnnnnnnnnnnnnnnnnnnnnnnnnnnnnnnnnnnnnnnnnnnnnnnnnnnnnnnnnnnnnnnnnnnnnnnnnnnnnnnnnnnnnnnnnnnnnnnnnnnnnnnnnnnnnnnnnnnnnnnnnnnnnnnnnnnnnnnnnnnnnnnnnnnnnnnnnnnnnnnnnnnnnnnnnnnnnnnnnnnnnnnnnnnnnnnnnnnnnnnnnnnnnnnnnnnnnnnnnnnnnnnnnnnnnnnnnnnnnnnnnnnnnnnnnnnnnnnnnnnnnnnnnnnnnnnnnnnnnnnnnnnnnnnnnnnnnnnnnnnnnnnnnnnnnnnnnnnnnnnnnnnnnnnnnnnnnnnnnnnnnnnnnnnnnnnnnnnnnnnnnnnnnnnnnnnnnnnnnnnnnnnnnnnnnnnnnnnnnnnnnnnnnnnnnnnnnnnnnnnnnnnnnnnnnnnnnnnnnnnnnnnnnnnnnnnnnnnnnnnnnnnnnnnnnnnnnnnnnnnnnnnnnnnnnnnnnnnnnnnnnnnnnnnnnnnnnnnnnnnnnnnnnnnnnnnnnnnnnnnnnnnnnnnnnnnnnnnnnnnnnnnnnnnnnnnnnnnnnnnnnnnnnnnnnnnnnnnnnnnnnnnnnnnnnnnnnnnnnnnnnnnnnnnnnnnnnnnnnnnnnnnnnnnnnnnnnnnnnnnnnnnnnnnnnnnnnnnnnnnnnnnnnnnnnnnnnnnnnnnnnnnnnnnnnnnnnnnnnnnnnnnnnnnnnnnnnnnnnnnnnnnnnnnnnnnnnnnnnnnnnnnnnnnnnnnnnnnnnnnnnnnnnnnnnnnnnnnnnnnnnnnnnnnnnnnnnnnnnnnnnnnnnnnnnnnnnnnnnnnnnnnnnnnnnnnnnnnnnnnnnnnnnnnnnnnnnnnnnnnnnnnnnnnnnnnnnnnnnnnnnnnnnnnnnnnnnnnnnnnnnnnnnnnnnnnnnnnnnnnnnnnnnnnnnnnnnnnnnnnnnnnnnnnnnnnnnnnnnnnnnnnnnnnnnnnnnnnnnnnnnnnnnnnnnnnnnnnnnnnnnnnnnnnnnnnnnnnnnnnnnnnnnnnnnnnnnnnnnnnnnnnnnnnnnnnnnnnnnnnnnnnnnnnnnnnnnnnnnnnnnnnnnnnnnnnnnnnnnnnnnnnnnnnnnnnnnnnnnnnnnnnnnnnnnnnnnnnnnnnnnnnnnnnnnnnnnnnnnnnnnnnnnnnnnnnnnnnnnnnnnnnnnnnnnnnnnnnnnnnnnnnnnnnnnnnnnnnnnnnnnnnnnnnnnnnnnnnnnnnnnnnnnnnnnnnnnnnnnnnnnnnnnnnnnnnnnnnnnnnnnnnnnnnnnnnnnnnnnnnnnnnnnnnnnnnnnnnnnnnnnnnnnnnnnnnnnnnnnnnnnnnnnnnnnnnnnnnnnnnnnnnnnnnnnnnnnnnnnnnnnnnnnnnnnnnnnnnnnnnnnnnnnnnnnnnnnnnnnnnnnnnnnnnnnnnnnnnnnnnnnnnnnnnnnnnnnnnnnnnnnnnnnnnnnnnnnnnnnnnnnnnnnnnnnnnnnnnnnnnnnnnnnnnnnnnnnnnnnnnnnnnnnnnnnnnnnnnnnnnnnnnnnnnnnnnnnnnnnnnnnnnnnnnnnnnnnnnnnnnnnnnnnnnnnnnnnnnnnnnnnnnnnnnnnnnnnnnnnnnnnnnnnnnnnnnnnnnnnnnnnnnnnnnnnnnnnnnnnnnnnnnnnnnnnnnnnnnnnnnnnnnnnnnnnnnnnnnnnnnnnnnnnnnnnnnnnnnnnnnnnnnnnnnnnnnnnnnnnnnnnnnnnnnnnnnnnnnnnnnnnnnnnnnnnnnnnnnnnnnnnnnnnnnnnnnnnnnnnnnnnnnnnnnnnnnnnnnnnnnnnnnnnnnnnnnnnnnnnnnnnnnnnnnnnnnnnnnnnnnnnnnnnnnnnnnnnnnnnnnnnnnnnnnnnnnnnnnnnnnnnnnnnnnnnnnnnnnnnnnnnnnnnnnnnnnnnnnnnnnnnnnnnnnnnnnnnnnnnnnnnnnnnnnnnnnnnnnnnnnnnnnnnnnnnnnnnnnnnnnnnnnnnnnnnnnnnnnnnnnnnnnnnnnnnnnnnnnnnnnnnnnnnnnnnnnnnnnnnnnnnnnnnnnnnnnnnnnnnnnnnnnnnnnnnnnnnnnnnnnnnnnnnnnnnnnnnnnnnnnnnnnnnnnnnnnnnnnnnnnnnnnnnnnnnnnnnnnnnnnnnnnnnnnnnnnnnnnnnnnnnnnnnnnnnnnnnnnnnnnnnnnnnnnnnnnnnnnnnnnnnnnnnnnnnnnnnnnnnnnnnnnnnnnnnnnnnnnnnnnnnnnnnnnnnnnnnnnnnnnnnnnnnnnnnnnnnnnnnnnnnnnnnnnnnnnnnnnnnnnnnnnnnnnnnnnnnnnnnnnnnnnnnnnnnnnnnnnnnnnnnnnnnnnnnnnnnnnnnnnnnnnnnnnnnnnnnnnnnnnnnnnnnnnnnnnnnnnnnnnnnnnnnnnnnnnnnnnnnnnnnnnnnnnnnnnnnnnnnnnnnnnnnnnnnnnnnnnnnnnnnnnnnnnnnnnnnnnnnnnnnnnnnnnnnnnnnnnnnnnnnnnnnnnnnnnnnnnnnnnnnnnnnnnnnnnnnnnnnnnnnnnnnnnnnnnnnnnnnnnnnnnnnnnnnnnnnnnnnnnnnnnnnnnnnnnnnnnnnnnnnnnnnnnnnnnnnnnnnnnnnnnnnnnnnnnnnnnnnnnnnnnnnnnnnnnnnnnnnnnnnnnnnnnnnnnnnnnnnnnnnnnnnnnnnnnnnnnnnnnnnnnnnnnnnnnnnnnnnnnnnnnnnnnnnnnnnnnnnnnnnnnnnnnnnnnnnnnnnnnnnnnnnnnnnnnnnnnnnnnnnnnnnnnnnnnnnnnnnnnnnnnnnnnnnnnnnnnnnnnnnnnnnnnnnnnnnnnnnnnnnnnnnnnnnnnnnnnnnnnnnnnnnnnnnnnnnnnnnnnnnnnnnnnnnnnnnnnnnnnnnnnnnnnnnnnnnnnnnnnnnnnnnnnnnnnnnnnnnnnnnnnnnnnnnnnnnnnnnnnnnnnnnnnnnnnnnnnnnnnnnnnnnnnnnnnnnnnnnnnnnnnnnnnnnnnnnnnnnnnnnnnnnnnnnnnnnnnnnnnnnnnnnnnnnnnnnnnnnnnnnnnnnnnnnnnnnnnnnnnnnnnnnnnnnnnnnnnnnnnnnnnnnnnnnnnnnnnnnnnnnnnnnnnnnnnnnnnnnnnnnnnnnnnnnnnnnnnnnnnnnnnnnnnnnnnnnnnnnnnnnnnnnnnnnnnnnnnnnnnnnnnnnnnnnnnnnnnnnnnnnnnnnnnnnnnnnnnnnnnnnnnnnnnnnnnnnnnnnnnnnnnnnnnnnnnnnnnnnnnnnnnnnnnnnnnnnnnnnnnnnnnnnnnnnnnnnnnnnnnnnnnnnnnnnnnnnnnnnnnnnnnnnnnnnnnnnnnnnnnnnnnnnnnnnnnnnnnnnnnnnnnnnnnnnnnnnnnnnnnnnnnnnnnnnnnnnnnnnnnnnnnnnnnnnnnnnnnnnnnnnnnnnnnnnnnnnnnnnnnnnnnnnnnnnnnnnnnnnnnnnnnnnnnnnnnnnnnnnnnnnnnnnnnnnnnnnnnnnnnnnnnnnnnnnnnnnnnnnnnnnnnnnnnnnnnnnnnnnnnnnnnnnnnnnnnnnnnnnnnnnnnnnnnnnnnnnnnnnnnnnnnnnnnnnnnnnnnnnnnnnnnnnnnnnnnnnnnnnnnnnnnnnnnnnnnnnnnnnnnnnnnnnnnnnnnnnnnnnnnnnnnnnnnnnnnnnnnnnnnnnnnnnnnnnnnnnnnnnnnnnnnnnnnnnnnnnnnnnnnnnnnnnnnnnnnnnnnnnnnnnnnnnnnnnnnnnnnnnnnnnnnnnnnnnnnnnnnnnnnnnnnnnnnnnnnnnnnnnnnnnnnnnnnnnnnnnnnnnnnnnnnnnnnnnnnnnnnnnnnnnnnnnnnnnnnnnnnnnnnnnnnnnnnnnnnnnnnnnnnnnnnnnnnnnnnnnnnnnnnnnnnnnnnnnnnnnnnnnnnnnnnnnnnnnnnnnnnnnnnnnnnnnnnnnnnnnnnnnnnnnnnnnnnnnnnnnnnnnnnnnnnnnnnnnnnnnnnnnnnnnnnnnnnnnnnnnnnnnnnnnnnnnnnnnnnnnnnnnnnnnnnnnnnnnnnnnnnnnnnnnnnnnnnnnnnnnnnnnnnnnnnnnnnnnnnnnnnnnnnnnnnnnnnnnnnnnnnnnnnnnnnnnnnnnnnnnnnnnnnnnnnnnnnnnnnnnnnnnnnnnnnnnnnnnnnnnnnnnnnnnnnnnnnnnnnnnnnnnnnnnnnnnnnnnnnnnnnnnnnnnnnnnnnnnnnnnnnnnnnnnnnnnnnnnnnnnnnnnnnnnnnnnnnnnnnnnnnnnnnnnnnnnnnnnnnnnnnnnnnnnnnnnnnnnnnnnnnnnnnnnnnnnnnnnnnnnnnnnnnnnnnnnnnnnnnnnnnnnnnnnnnnnnnnnnnnnnnnnnnnnnnnnnnnnnnnnnnnnnnnnnnnnnnnnnnnnnnnnnnnnnnnnnnnnnnnnnnnnnnnnnnnnnnnnnnnnnnnnnnnnnnnnnnnnnnnnnnnnnnnnnnnnnnnnnnnnnnnnnnnnnnnnnnnnnnnnnnnnnnnnnnnnnnnnnnnnnnnnnnnnnnnnnnnnnnnnnnnnnnnnnnnnnnnnnnnnnnnnnnnnnnnnnnnnnnnnnnnnnnnnnnnnnnnnnnnnnnnnnnnnnnnnnnnnnnnnnnnnnnnnnnnnnnnnnnnnnnnnnnnnnnnnnnnnnnnnnnnnnnnnnnnnnnnnnnnnnnnnnnnnnnnnnnnnnnnnnnnnnnnnnnnnnnnnnnnnnnnnnnnnnnnnnnnnnnnnnnnnnnnnnnnnnnnnnnnnnnnnnnnnnnnnnnnnnnnnnnnnnnnnnnnnnnnnnnnnnnnnnnnnnnnnnnnnnnnnnnnnnnnnnnnnnnnnnnnnnnnnnnnnnnnnnnnnnnnnnnnnnnnnnnnnnnnnnnnnnnnnnnnnnnnnnnnnnnnnnnnnnnnnnnnnnnnnnnnnnnnnnnnnnnnnnnnnnnnnnnnnnnnnnnnnnnnnnnnnnnnnnnnnnnnnnnnnnnnnnnnnnnnnnnnnnnnnnnnnnnnnnnnnnnnnnnnnnnnnnnnnnnnnnnnnnnnnnnnnnnnnnnnnnnnnnnnnnnnnnnnnnnnnnnnnnnnnnnnnnnnnnnnnnnnnnnnnnnnnnnnnnnnnnnnnnnnnnnnnnnnnnnnnnnnnnnnnnnnnnnnnnnnnnnnnnnnnnnnnnnnnnnnnnnnnnnnnnnnnnnnnnnnnnnnnnnnnnnnnnnnnnnnnnnnnnnnnnnnnnnnnnnnnnnnnnnnnnnnnnnnnnnnnnnnnnnnnnnnnnnnnnnnnnnnnnnnnnnnnnnnnnnnnnnnnnnnnnnnnnnnnnnnnnnnnnnnnnnnnnnnnnnnnnnnnnnnnnnnnnnnnnnnnnnnnnnnnnnnnnnnnnnnnnnnnnnnnnnnnnnnnnnnnnnnnnnnnnnnnnnnnnnnnnnnnnnnnnnnnnnnnnnnnnnnnnnnnnnnnnnnnnnnnnnnnnnnnnnnnnnnnnnnnnnnnnnnnnnnnnnnnnnnnnnnnnnnnnnnnnnnnnnnnnnnnnnnnnnnnnnnnnnnnnnnnnnnnnnnnnnnnnnnnnnnnnnnnnnnnnnnnnnnnnnnnnnnnnnnnnnnnnnnnnnnnnnnnnnnnnnnnnnnnnnnnnnnnnnnnnnnnnnnnnnnnnnnnnnnnnnnnnnnnnnnnnnnnnnnnnnnnnnnnnnnnnnnnnnnnnnnnnnnnnnnnnnnnnnnnnnnnnnnnnnnnnnnnnnnnnnnnnnnnnnnnnnnnnnnnnnnnnnnnnnnnnnnnnnnnnnnnnnnnnnnnnnnnnnnnnnnnnnnnnnnnnnnnnnnnnnnnnnnnnnnnnnnnnnnnnnnnnnnnnnnnnnnnnnnnnnnnnnnnnnnnnnnnnnnnnnnnnnnnnnnnnnnnnnnnnnnnnnnnnnnnnnnnnnnnnnnnnnnnnnnnnnnnnnnnnnnnnnnnnnnnnnnnnnnnnnnnnnnnnnnnnnnnnnnnnnnnnnnnnnnnnnnnnnnnnnnnnnnnnnnnnnnnnnnnnnnnnnnnnnnnnnnnnnnnnnnnnnnnnnnnnnnnnnnnnnnnnnnnnnnnnnnnnnnnnnnnnnnnnnnnnnnnnnnnnnnnnnnnnnnnnnnnnnnnnnnnnnnnnnnnnnnnnnnnnnnnnnnnnnnnnnnnnnnnnnnnnnnnnnnnnnnnnnnnnnnnnnnnnnnnnnnnnnnnnnnnnnnnnnnnnnnnnnnnnnnnnnnnnnnnnnnnnnnnnnnnnnnnnnnnnnnnnnnnnnnnnnnnnnnnnnnnnnnnnnnnnnnnnnnnnnnnnnnnnnnnnnnnnnnnnnnnnnnnnnnnnnnnnnnnnnnnnnnnnnnnnnnnnnnnnnnnnnnnnnnnnnnnnnnnnnnnnnnnnnnnnnnnnnnnnnnnnnnnnnnnnnnnnnnnnnnnnnnnnnnnnnnnnnnnnnnnnnnnnnnnnnnnnnnnnnnnnnnnnnnnnnnnnnnnnnnnnnnnnnnnnnnnnnnnnnnnnnnnnnnnnnnnnnnnnnnnnnnnnnnnnnnnnnnnnnnnnnnnnnnnnnnnnnnnnnnnnnnnnnnnnnnnnnnnnnnnnnnnnnnnnnnnnnnnnnnnnnnnnnnnnnnnnnnnnnnnnnnnnnnnnnnnnnnnnnnnnnnnnnnnnnnnnnnnnnnnnnnnnnnnnnnnnnnnnnnnnnnnnnnnnnnnnnnnnnnnnnnnnnnnnnnnnnnnnnnnnnnnnnnnnnnnnnnnnnnnnnnnnnnnnnnnnnnnnnnnnnnnnnnnnnnnnnnnnnnnnnnnnnnnnnnnnnnnnnnnnnnnnnnnnnnnnnnnnnnnnnnnnnnnnnnnnnnnnnnnnnnnnnnnnnnnnnnnnnnnnnnnnnnnnnnnnnnnnnnnnnnnnnnnnnnnnnnnnnnnnnnnnnnnnnnnnnnnnnnnnnnnnnnnnnnnnnnnnnnnnnnnnnnnnnnnnnnnnnnnnnnnnnnnnnnnnnnnnnnnnnnnnnnnnnnnnnnnnnnnnnnnnnnnnnnnnnnnnnnnnnnnnnnnnnnnnnnnnnnnnnnnnnnnnnnnnnnnnnnnnnnnnnnnnnnnnnnnnnnnnnnnnnnnnnnnnnnnnnnnnnnnnnnnnnnnnnnnnnnnnnnnnnnnnnnnnnnnnnnnnnnnnnnnnnnnnnnnnnnnnnnnnnnnnnnnnnnnnnnnnnnnnnnnnnnnnnnnnnnnnnnnnnnnnnnnnnnnnnnnnnnnnnnnnnnnnnnnnnnnnnnnnnnnnnnnnnnnnnnnnnnnnnnnnnnnnnnnnnnnnnnnnnnnnnnnnnnnnnnnnnnnnnnnnnnnnnnnnnnnnnnnnnnnnnnnnnnnnnnnnnnnnnnnnnnnnnnnnnnnnnnnnnnnnnnnnnnnnnnnnnnnnnnnnnnnnnnnnnnnnnnnnnnnnnnnnnnnnnnnnnnnnnnnnnnnnnnnnnnnnnnnnnnnnnnnnnnnnnnnnnnnnnnnnnnnnnnnnnnnnnnnnnnnnnnnnnnnnnnnnnnnnnnnnnnnnnnnnnnnnnnnnnnnnnnnnnnnnnnnnnnnnnnnnnnnnnnnnnnnnnnnnnnnnnnnnnnnnnnnnnnnnnnnnnnnnnnnnnnnnnnnnnnnnnnnnnnnnnnnnnnnnnnnnnnnnnnnnnnnnnnnnnnnnnnnnnnnnnnnnnnnnnnnnnnnnnnnnnnnnnnnnnnnnnnnnnnnnnnnnnnnnnnnnnnnnnnnnnnnnnnnnnnnnnnnnnnnnnnnnnnnnnnnnnnnnnnnnnnnnnnnnnnnnnnnnnnnnnnnnnnnnnnnnnnnnnnnnnnnnnnnnnnnnnnnnnnnnnnnnnnnnnnnnnnnnnnnnnnnnnnnnnnnnnnnnnnnnnnnnnnnnnnnnnnnnnnnnnnnnnnnnnnnnnnnnnnnnnnnnnnnnnnnnnnnnnnnnnnnnnnnnnnnnnnnnnnnnnnnnnnnnnnnnnnnnnnnnnnnnnnnnnnnnnnnnnnnnnnnnnnnnnnnnnnnnnnnnnnnnnnnnnnnnnnnnnnnnnnnnnnnnnnnnnnnnnnnnnnnnnnnnnnnnnnnnnnnnnnnnnnnnnnnnnnnnnnnnnnnnnnnnnnnnnnnnnnnnnnnnnnnnnnnnnnnnnnnnnnnnnnnnnnnnnnnnnnnnnnnnnnnnnnnnnnnnnnnnnnnnnnnnnnnnnnnnnnnnnnnnnnnnnnnnnnnnnnnnnnnnnnnnnnnnnnnnnnnnnnnnnnnnnnnnnnnnnnnnnnnnnnnnnnnnnnnnnnnnnnnnnnnnnnnnnnnnnnnnnnnnnnnnnnnnnnnnnnnnnnnnnnnnnnnnnnnnnnnnnnnnnnnnnnnnnnnnnnnnnnnnnnnnnnnnnnnnnnnnnnnnnnnnnnnnnnnnnnnnnnnnnnnnnnnnnnnnnnnnnnnnnnnnnnnnnnnnnnnnnnnnnnnnnnnnnnnnnnnnnnnnnnnnnnnnnnnnnnnnnnnnnnnnnnnnnnnnnnnnnnnnnnnnnnnnnnnnnnnnnnnnnnnnnnnnnnnnnnnnnnnnnnnnnnnnnnnnnnnnnnnnnnnnnnnnnnnnnnnnnnnnnnnnnnnnnnnnnnnnnnnnnnnnnnnnnnnnnnnnnnnnnnnnnnnnnnnnnnnnnnnnnnnnnnnnnnnnnnnnnnnnnnnnnnnnnnnnnnnnnnnnnnnnnnnnnnnnnnnnnnnnnnnnnnnnnnnnnnnnnnnnnnnnnnnnnnnnnnnnnnnnnnnnnnnnnnnnnnnnnnnnnnnnnnnnnnnnnnnnnnnnnnnnnnnnnnnnnnnnnnnnnnnnnnnnnnnnnnnnnnnnnnnnnnnnnnnnnnnnnnnnnnnnnnnnnnnnnnnnnnnnnnnnnnnnnnnnnnnnnnnnnnnnnnnnnnnnnnnnnnnnnnnnnnnnnnnnnnnnnnnnnnnnnnnnnnnnnnnnnnnnnnnnnnnnnnnnnnnnnnnnnnnnnnnnnnnnnnnnnnnnnnnnnnnnnnnnnnnnnnnnnnnnnnnnnnnnnnnnnnnnnnnnnnnnnnnnnnnnnnnnnnnnnnnnnnnnnnnnnnnnnnnnnnnnnnnnnnnnnnnnnnnnnnnnnnnnnnnnnnnnnnnnnnnnnnnnnnnnnnnnnnnnnnnnnnnnnnnnnnnnnnnnnnnnnnnnnnnnnnnnnnnnnnnnnnnnnnnnnnnnnnnnnnnnnnnnnnnnnnnnnnnnnnnnnnnnnnnnnnnnnnnnnnnnnnnnnnnnnnnnnnnnnnnnnnnnnnnnnnnnnnnnnnnnnnnnnnnnnnnnnnnnnnnnnnnnnnnnnnnnnnnnnnnnnnnnnnnnnnnnnnnnnnnnnnnnnnnnnnnnnnnnnnnnnnnnnnnnnnnnnnnnnnnnnnnnnnnnnnnnnnnnnnnnnnnnnnnnnnnnnnnnnnnnnnnnnnnnnnnnnnnnnnnnnnnnnnnnnnnnnnnnnnnnnnnnnnnnnnnnnnnnnnnnnnnnnnnnnnnnnnnnnnnnnnnnnnnnnnnnnnnnnnnnnnnnnnnnnnnnnnnnnnnnnnnnnnnnnnnnnnnnnnnnnnnnnnnnnnnnnnnnnnnnnnnnnnnnnnnnnnnnnnnnnnnnnnnnnnnnnnnnnnnnnnnnnnnnnnnnnnnnnnnnnnnnnnnnnnnnnnnnnnnnnnnnnnnnnnnnnnnnnnnnnnnnnnnnnnnnnnnnnnnnnnnnnnnnnnnnnnnnnnnnnnnnnnnnnnnnnnnnnnnnnnnnnnnnnnnnnnnnnnnnnnnnnnnnnnnnnnnnnnnnnnnnnnnnnnnnnnnnnnnnnnnnnnnnnnnnnnnnnnnnnnnnnnnnnnnnnnnnnnnnnnnnnnnnnnnnnnnnnnnnnnnnnnnnnnnnnnnnnnnnnnnnnnnnnnnnnnnnnnnnnnnnnnnnnnnnnnnnnnnnnnnnnnnnnnnnnnnnnnnnnnnnnnnnnnnnnnnnnnnnnnnnnnnnnnnnnnnnnnnnnnnnnnnnnnnnnnnnnnnnnnnnnnnnnnnnnnnnnnnnnnnnnnnnnnnnnnnnnnnnnnnnnnnnnnnnnnnnnnnnnnnnnnnnnnnnnnnnnnnnnnnnnnnnnnnnnnnnnnnnnnnnnnnnnnnnnnnnnnnnnnnnnnnnnnnnnnnnnnnnnnnnnnnnnnnnnnnnnnnnnnnnnnnnnnnnnnnnnnnnnnnnnnnnnnnnnnnnnnnnnnnnnnnnnnnnnnnnnnnnnnnnnnnnnnnnnnnnnnnnnnnnnnnnnnnnnnnnnnnnnnnnnnnnnnnnnnnnnnnnnnnnnnnnnnnnnnnnnnnnnnnnnnnnnnnnnnnnnnnnnnnnnnnnnnnnnnnnnnnnnnnnnnnnnnnnnnnnnnnnnnnnnnnnnnnnnnnnnnnnnnnnnnnnnnnnnnnnnnnnnnnnnnnnnnnnnnnnnnnnnnnnnnnnnnnnnnnnnnnnnnnnnnnnnnnnnnnnnnnnnnnnnnnnnnnnnnnnnnnnnnnnnnnnnnnnnnnnnnnnnnnnnnnnnnnnnnnnnnnnnnnnnnnnnnnnnnnnnnnnnnnnnnnnnnnnnnnnnnnnnnnnnnnnnnnnnnnnnnnnnnnnnnnnnnnnnnnnnnnnnnnnnnnnnnnnnnnnnnnnnnnnnnnnnnnnnnnnnnnnnnnnnnnnnnnnnnnnnnnnnnnnnnnnnnnnnnnnnnnnnnnnnnnnnnnnnnnnnnnnnnnnnnnnnnnnnnnnnnnnnnnnnnnnnnnnnnnnnnnnnnnnnnnnnnnnnnnnnnnnnnnnnnnnnnnnnnnnnnnnnnnnnnnnnnnnnnnnnnnnnnnnnnnnnnnnnnnnnnnnnnnnnnnnnnnnnnnnnnnnnnnnnnnnnnnnnnnnnnnnnnnnnnnnnnnnnnnnnnnnnnnnnnnnnnnnnnnnnnnnnnnnnnnnnnnnnnnnnnnnnnnnnnnnnnnnnnnnnnnnnnnnnnnnnnnnnnnnnnnnnnnnnnnnnnnnnnnnnnnnnnnnnnnnnnnnnnnnnnnnnnnnnnnnnnnnnnnnnnnnnnnnnnnnnnnnnnnnnnnnnnnnnnnnnnnnnnnnnnnnnnnnnnnnnnnnnnnnnnnnnnnnnnnnnnnnnnnnnnnnnnnnnnnnnnnnnnnnnnnnnnnnnnnnnnnnnnnnnnnnnnnnnnnnnnnnnnnnnnnnnnnnnnnnnnnnnnnnnnnnnnnnnnnnnnnnnnnnnnnnnnnnnnnnnnnnnnnnnnnnnnnnnnnnnnnnnnnnnnnnnnnnnnnnnnnnnnnnnnnnnnnnnnnnnnnnnnnnnnnnnnnnnnnnnnnnnnnnnnnnnnnnnnnnnnnnnnnnnnnnnnnnnnnnnnnnnnnnnnnnnnnnnnnnnnnnnnnnnnnnnnnnnnnnnnnnnnnnnnnnnnnnnnnnnnnnnnnnnnnnnnnnnnnnnnnnnnnnnnnnnnnnnnnnnnnnnnnnnnnnnnnnnnnnnnnnnnnnnnnnnnnnnnnnnnnnnnnnnnnnnnnnnnnnnnnnnnnnnnnnnnnnnnnnnnnnnnnnnnnnnnnnnnnnnnnnnnnnnnnnnnnnnnnnnnnnnnnnnnnnnnnnnnnnnnnnnnnnnnnnnnnnnnnnnnnnnnnnnnnnnnnnnnnnnnnnnnnnnnnnnnnnnnnnnnnnnnnnnnnnnnnnnnnnnnnnnnnnnnnnnnnnnnnnnnnnnnnnnnnnnnnnnnnnnnnnnnnnnnnnnnnnnnnnnnnnnnnnnnnnnnnnnnnnnnnnnnnnnnnnnnnnnnnnnnnnnnnnnnnnnnnnnnnnnnnnnnnnnnnnnnnnnnnnnnnnnnnnnnnnnnnnnnnnnnnnnnnnnnnnnnnnnnnnnnnnnnnnnnnnnnnnnnnnnnnnnnnnnnnnnnnnnnnnnnnnnnnnnnnnnnnnnnnnnnnnnnnnnnnnnnnnnnnnnnnnnnnnnnnnnnnnnnnnnnnnnnnnnnnnnnnnnnnnnnnnnnnnnnnnnnnnnnnnnnnnnnnnnnnnnnnnnnnnnnnnnnnnnnnnnnnnnnnnnnnnnnnnnnnnnnnnnnnnnnnnnnnnnnnnnnnnnnnnnnnnnnnnnnnnnnnnnnnnnnnnnnnnnnnnnnnnnnnnnnnnnnnnnnnnnnnnnnnnnnnnnnnnnnnnnnnnnnnnnnnnnnnnnnnnnnnnnnnnnnnnnnnnnnnnnnnnnnnnnnnnnnnnnnnnnnnnnnnnnnnnnnnnnnnnnnnnnnnnnnnnnnnnnnnnnnnnnnnnnnnnnnnnnnnnnnnnnnnnnnnnnnnnnnnnnnnnnnnnnnnnnnnnnnnnnnnnnnnnnnnnnnnnnnnnnnnnnnnnnnnnnnnnnnnnnnnnnnnnnnnnnnnnnnnnnnnnnnnnnnnnnnnnnnnnnnnnnnnnnnnnnnnnnnnnnnnnnnnnnnnnnnnnnnnnnnnnnnnnnnnnnnnnnnnnnnnnnnnnnnnnnnnnnnnnnnnnnnnnnnnnnnnnnnnnnnnnnnnnnnnnnnnnnnnnnnnnnnnnnnnnnnnnnnnnnnnnnnnnnnnnnnnnnnnnnnnnnnnnnnnnnnnnnnnnnnnnnnnnnnnnnnnnnnnnnnnnnnnnnnnnnnnnnnnnnnnnnnnnnnnnnnnnnnnnnnnnnnnnnnnnnnnnnnnnnnnnnnnnnnnnnnnnnnnnnnnnnnnnnnnnnnnnnnnnnnnnnnnnnnnnnnnnnnnnnnnnnnnnnnnnnnnnnnnnnnnnnnnnnnnnnnnnnnnnnnnnnnnnnnnnnnnnnnnnnnnnnnnnnnnnnnnnnnnnnnnnnnnnnnnnnnnnnnnnnnnnnnnnnnnnnnnnnnnnnnnnnnnnnnnnnnnnnnnnnnnnnnnnnnnnnnnnnnnnnnnnnnnnnnnnnnnnnnnnnnnnnnnnnnnnnnnnnnnnnnnnnnnnnnnnnnnnnnnnnnnnnnnnnnnnnnnnnnnnnnnnnnnnnnnnnnnnnnnnnnnnnnnnnnnnnnnnnnnnnnnnnnnnnnnnnnnnnnnnnnnnnnnnnnnnnnnnnnnnnnnnnnnnnnnnnnnnnnnnnnnnnnnnnnnnnnnnnnnnnnnnnnnnnnnnnnnnnnnnnnnnnnnnnnnnnnnnnnnnnnnnnnnnnnnnnnnnnnnnnnnnnnnnnnnnnnnnnnnnnnnnnnnnnnnnnnnnnnnnnnnnnnnnnnnnnnnnnnnnnnnnnnnnnnnnnnnnnnnnnnnnnnnnnnnnnnnnnnnnnnnnnnnnnnnnnnnnnnnnnnnnnnnnnnnnnnnnnnnnnnnnnnnnnnnnnnnnnnnnnnnnnnnnnnnnnnnnnnnnnnnnnnnnnnnnnnnnnnnnnnnnnnnnnnnnnnnnnnnnnnnnnnnnnnnnnnnnnnnnnnnnnnnnnnnnnnnnnnnnnnnnnnnnnnnnnnnnnnnnnnnnnnnnnnnnnnnnnnnnnnnnnnnnnnnnnnnnnnnnnnnnnnnnnnnnnnnnnnnnnnnnnnnnnnnnnnnnnnnnnnnnnnnnnnnnnnnnnnnnnnnnnnnnnnnnnnnnnnnnnnnnnnnnnnnnnnnnnnnnnnnnnnnnnnnnnnnnnnnnnnnnnnnnnnnnnnnnnnnnnnnnnnnnnnnnnnnnnnnnnnnnnnnnnnnnnnnnnnnnnnnnnnnnnnnnnnnnnnnnnnnnnnnnnnnnnnnnnnnnnnnnnnnnnnnnnnnnnnnnnnnnnnnnnnnnnnnnnnnnnnnnnnnnnnnnnnnnnnnnnnnnnnnnnnnnnnnnnnnnnnnnnnnnnnnnnnnnnnnnnnnnnnnnnnnnnnnnnnnnnnnnnnnnnnnnnnnnnnnnnnnnnnnnnnnnnnnnnnnnnnnnnnnnnnnnnnnnnnnnnnnnnnnnnnnnnnnnnnnnnnnnnnnnnnnnnnnnnnnnnnnnnnnnnnnnnnnnnnnnnnnnnnnnnnnnnnnnnnnnnnnnnnnnnnnnnnnnnnnnnnnnnnnnnnnnnnnnnnnnnnnnnnnnnnnnnnnnnnnnnnnnnnnnnnnnnnnnnnnnnnnnnnnnnnnnnnnnnnnnnnnnnnnnnnnnnnnnnnnnnnnnnnnnnnnnnnnnnnnnnnnnnnnnnnnnnnnnnnnnnnnnnnnnnnnnnnnnnnnnnnnnnnnnnnnnnnnnnnnnnnnnnnnnnnnnnnnnnnnnnnnnnnnnnnnnnnnnnnnnnnnnnnnnnnnnnnnnnnnnnnnnnnnnnnnnnnnnnnnnnnnnnnnnnnnnnnnnnnnnnnnnnnnnnnnnnnnnnnnnnnnnnnnnnnnnnnnnnnnnnnnnnnnnnnnnnnnnnnnnnnnnnnnnnnnnnnnnnnnnnnnnnnnnnnnnnnnnnnnnnnnnnnnnnnnnnnnnnnnnnnnnnnnnnnnnnnnnnnnnnnnnnnnnnnnnnnnnnnnnnnnnnnnnnnnnnnnnnnnnnnnnnnnnnnnnnnnnnnnnnnnnnnnnnnnnnnnnnnnnnnnnnnnnnnnnnnnnnnnnnnnnnnnnnnnnnnnnnnnnnnnnnnnnnnnnnnnnnnnnnnnnnnnnnnnnnnnnnnnnnnnnnnnnnnnnnnnnnnnnnnnnnnnnnnnnnnnnnnnnnnnnnnnnnnnnnnnnnnnnnnnnnnnnnnnnnnnnnnnnnnnnnnnnnnnnnnnnnnnnnnnnnnnnnnnnnnnnnnnnnnnnnnnnnnnnnnnnnnnnnnnnnnnnnnnnnnnnnnnnnnnnnnnnnnnnnnnnnnnnnnnnnnnnnnnnnnnnnnnnnnnnnnnnnnnnnnnnnnnnnnnnnnnnnnnnnnnnnnnnnnnnnnnnnnnnnnnnnnnnnnnnnnnnnnnnnnnnnnnnnnnnnnnnnnnnnnnnnnnnnnnnnnnnnnnnnnnnnnnnnnnnnnnnnnnnnnnnnnnnnnnnnnnnnnnnnnnnnnnnnnnnnnnnnnnnnnnnnnnnnnnnnnnnnnnnnnnnnnnnnnnnnnnnnnnnnnnnnnnnnnnnnnnnnnnnnnnnnnnnnnnnnnnnnnnnnnnnnnnnnnnnnnnnnnnnnnnnnnnnnnnnnnnnnnnnnnnnnnnnnnnnnnnnnnnnnnnnnnnnnnnnnnnnnnnnnnnnnnnnnnnnnnnnnnnnnnnnnnnnnnnnnnnnnnnnnnnnnnnnnnnnnnnnnnnnnnnnnnnnnnnnnnnnnnnnnnnnnnnnnnnnnnnnnnnnnnnnnnnnnnnnnnnnnnnnnnnnnnnnnnnnnnnnnnnnnnnnnnnnnnnnnnnnnnnnnnnnnnnnnnnnnnnnnnnnnnnnnnnnnnnnnnnnnnnnnnnnnnnnnnnnnnnnnnnnnnnnnnnnnnnnnnnnnnnnnnnnnnnnnnnnnnnnnnnnnnnnnnnnnnnnnnnnnnnnnnnnnnnnnnnnnnnnnnnnnnnnnnnnnnnnnnnnnnnnnnnnnnnnnnnnnnnnnnnnnnnnnnnnnnnnnnnnnnnnnnnnnnnnnnnnnnnnnnnnnnnnnnnnnnnnnnnnnnnnnnnnnnnnnnnnnnnnnnnnnnnnnnnnnnnnnnnnnnnnnnnnnnnnnnnnnnnnnnnnnnnnnnnnnnnnnnnnnnnnnnnnnnnnnnnnnnnnnnnnnnnnnnnnnnnnnnnnnnnnnnnnnnnnnnnnnnnnnnnnnnnnnnnnnnnnnnnnnnnnnnnnnnnnnnnnnnnnnnnnnnnnnnnnnnnnnnnnnnnnnnnnnnnnnnnnnnnnnnnnnnnnnnnnnnnnnnnnnnnnnnnnnnnnnnnnnnnnnnnnnnnnnnnnnnnnnnnnnnnnnnnnnnnnnnnnnnnnnnnnnnnnnnnnnnnnnnnnnnnnnnnnnnnnnnnnnnnnnnnnnnnnnnnnnnnnnnnnnnnnnnnnnnnnnnnnnnnnnnnnnnnnnnnnnnnnnnnnnnnnnnnnnnnnnnnnnnnnnnnnnnnnnnnnnnnnnnnnnnnnnnnnnnnnnnnnnnnnnnnnnnnnnnnnnnnnnnnnnnnnnnnnnnnnnnnnnnnnnnnnnnnnnnnnnnnnnnnnnnnnnnnnnnnnnnnnnnnnnnnnnnnnnnnnnnnnnnnnnnnnnnnnnnnnnnnnnnnnnnnnnnnnnnnnnnnnnnnnnnnnnnnnnnnnnnnnnnnnnnnnnnnnnnnnnnnnnnnnnnnnnnnnnnnnnnnnnnnnnnnnnnnnnnnnnnnnnnnnnnnnnnnnnnnnnnnnnnnnnnnnnnnnnnnnnnnnnnnnnnnnnnnnnnnnnnnnnnnnnnnnnnnnnnnnnnnnnnnnnnnnnnnnnnnnnnnnnnnnnnnnnnnnnnnnnnnnnnnnnnnnnnnnnnnnnnnnnnnnnnnnnnnnnnnnnnnnnnnnnnnnnnnnnnnnnnnnnnnnnnnnnnnnnnnnnnnnnnnnnnnnnnnnnnnnnnnnnnnnnnnnnnnnnnnnnnnnnnnnnnnnnnnnnnnnnnnnnnnnnnnnnnnnnnnnnnnnnnnnnnnnnnnnnnnnnnnnnnnnnnnnnnnnnnnnnnnnnnnnnnnnnnnnnnnnnnnnnnnnnnnnnnnnnnnnnnnnnnnnnnnnnnnnnnnnnnnnnnnnnnnnnnnnnnnnnnnnnnnnnnnnnnnnnnnnnnnnnnnnnnnnnnnnnnnnnnnnnnnnnnnnnnnnnnnnnnnnnnnnnnnnnnnnnnnnnnnnnnnnnnnnnnnnnnnnnnnnnnnnnnnnnnnnnnnnnnnnnnnnnnnnnnnnnnnnnnnnnnnnnnnnnnnnnnnnnnnnnnnnnnnnnnnnnnnnnnnnnnnnnnnnnnnnnnnnnnnnnnnnnnnnnnnnnnnnnnnnnnnnnnnnnnnnnnnnnnnnnnnnnnnnnnnnnnnnnnnnnnnnnnnnnnnnnnnnnnnnnnnnnnnnnnnnnnnnnnnnnnnnnnnnnnnnnnnnnnnnnnnnnnnnnnnnnnnnnnnnnnnnnnnnnnnnnnnnnnnnnnnnnnnnnnnnnnnnnnnnnnnnnnnnnnnnnnnnnnnnnnnnnnnnnnnnnnnnnnnnnnnnnnnnnnnnnnnnnnnnnnnnnnnnnnnnnnnnnnnnnnnnnnnnnnnnnnnnnnnnnnnnnnnnnnnnnnnnnnnnnnnnnnnnnnnnnnnnnnnnnnnnnnnnnnnnnnnnnnnnnnnnnnnnnnnnnnnnnnnnnnnnnnnnnnnnnnnnnnnnnnnnnnnnnnnnnnnnnnnnnnnnnnnnnnnnnnnnnnnnnnnnnnnnnnnnnnnnnnnnnnnnnnnnnnnnnnnnnnnnnnnnnnnnnnnnnnnnnnnnnnnnnnnnnnnnnnnnnnnnnnnnnnnnnnnnnnnnnnnnnnnnnnnnnnnnnnnnnnnnnnnnnnnnnnnnnnnnnnnnnnnnnnnnnnnnnnnnnnnnnnnnnnnnnnnnnnnnnnnnnnnnnnnnnnnnnnnnnnnnnnnnnnnnnnnnnnnnnnnnnnnnnnnnnnnnnnnnnnnnnnnnnnnnnnnnnnnnnnnnnnnnnnnnnnnnnnnnnnnnnnnnnnnnnnnnnnnnnnnnnnnnnnnnnnnnnnnnnnnnnnnnnnnnnnnnnnnnnnnnnnnnnnnnnnnnnnnnnnnnnnnnnnnnnnnnnnnnnnnnnnnnnnnnnnnnnnnnnnnnnnnnnnnnnnnnnnnnnnnnnnnnnnnnnnnnnnnnnnnnnnnnnnnnnnnnnnnnnnnnnnnnnnnnnnnnnnnnnnnnnnnnnnnnnnnnnnnnnnnnnnnnnnnnnnnnnnnnnnnnnnnnnnnnnnnnnnnnnnnnnnnnnnnnnnnnnnnnnnnnnnnnnnnnnnnnnnnnnnnnnnnnnnnnnnnnnnnnnnnnnnnnnnnnnnnnnnnnnnnnnnnnnnnnnnnnnnnnnnnnnnnnnnnnnnnnnnnnnnnnnnnnnnnnnnnnnnnnnnnnnnnnnnnnnnnnnnnnnnnnnnnnnnnnnnnnnnnnnnnnnnnnnnnnnnnnnnnnnnnnnnnnnnnnnnnnnnnnnnnnnnnnnnnnnnnnnnnnnnnnnnnnnnnnnnnnnnnnnnnnnnnnnnnnnnnnnnnnnnnnnnnnnnnnnnnnnnnnnnnnnnnnnnnnnnnnnnnnnnnnnnnnnnnnnnnnnnnnnnnnnnnnnnnnnnnnnnnnnnnnnnnnnnnnnnnnnnnnnnnnnnnnnnnnnnnnnnnnnnnnnnnnnnnnnnnnnnnnnnnnnnnnnnnnnnnnnnnnnnnnnnnnnnnnnnnnnnnnnnnnnnnnnnnnnnnnnnnnnnnnnnnnnnnnnnnnnnnnnnnnnnnnnnnnnnnnnnnnnnnnnnnnnnnnnnnnnnnnnnnnnnnnnnnnnnnnnnnnnnnnnnnnnnnnnnnnnnnnnnnnnnnnnnnnnnnnnnnnnnnnnnnnnnnnnnnnnnnnnnnnnnnnnnnnnnnnnnnnnnnnnnnnnnnnnnnnnnnnnnnnnnnnnnnnnnnnnnnnnnnnnnnnnnnnnnnnnnnnnnnnnnnnnnnnnnnnnnnnnnnnnnnnnnnnnnnnnnnnnnnnnnnnnnnnnnnnnnnnnnnnnnnnnnnnnnnnnnnnnnnnnnnnnnnnnnnnnnnnnnnnnnnnnnnnnnnnnnnnnnnnnnnnnnnnnnnnnnnnnnnnnnnnnnnnnnnnnnnnnnnnnnnnnnnnnnnnnnnnnnnnnnnnnnnnnnnnnnnnnnnnnnnnnnnnnnnnnnnnnnnnnnnnnnnnnnnnnnnnnnnnnnnnnnnnnnnnnnnnnnnnnnnnnnnnnnnnnnnnnnnnnnnnnnnnnnnnnnnnnnnnnnnnnnnnnnnnnnnnnnnnnnnnnnnnnnnnnnnnnnnnnnnnnnnnnnnnnnnnnnnnnnnnnnnnnnnnnnnnnnnnnnnnnnnnnnnnnnnnnnnnnnnnnnnnnnnnnnnnnnnnnnnnnnnnnnnnnnnnnnnnnnnnnnnnnnnnnnnnnnnnnnnnnnnnnnnnnnnnnnnnnnnnnnnnnnnnnnnnnnnnnnnnnnnnnnnnnnnnnnnnnnnnnnnnnnnnnnnnnnnnnnnnnnnnnnnnnnnnnnnnnnnnnnnnnnnnnnnnnnnnnnnnnnnnnnnnnnnnnnnnnnnnnnnnnnnnnnnnnnnnnnnnnnnnnnnnnnnnnnnnnnnnnnnnnnnnnnnnnnnnnnnnnnnnnnnnnnnnnnnnnnnnnnnnnnnnnnnnnnnnnnnnnnnnnnnnnnnnnnnnnnnnnnnnnnnnnnnnnnnnnnnnnnnnnnnnnnnnnnnnnnnnnnnnnnnnnnnnnnnnnnnnnnnnnnnnnnnnnnnnnnnnnnnnnnnnnnnnnnnnnnnnnnnnnnnnnnnnnnnnnnnnnnnnnnnnnnnnnnnnnnnnnnnnnnnnnnnnnnnnnnnnnnnnnnnnnnnnnnnnnnnnnnnnnnnnnnnnnnnnnnnnnnnnnnnnnnnnnnnnnnnnnnnnnnnnnnnnnnnnnnnnnnnnnnnnnnnnnnnnnnnnnnnnnnnnnnnnnnnnnnnnnnnnnnnnnnnnnnnnnnnnnnnnnnnnnnnnnnnnnnnnnnnnnnnnnnnnnnnnnnnnnnnnnnnnnnnnnnnnnnnnnnnnnnnnnnnnnnnnnnnnnnnnnnnnnnnnnnnnnnnnnnnnnnnnnnnnnnnnnnnnnnnnnnnnnnnnnnnnnnnnnnnnnnnnnnnnnnnnnnnnnnnnnnnnnnnnnnnnnnnnnnnnnnnnnnnnnnnnnnnnnnnnnnnnnnnnnnnnnnnnnnnnnnnnnnnnnnnnnnnnnnnnnnnnnnnnnnnnnnnnnnnnnnnnnnnnnnnnnnnnnnnnnnnnnnnnnnnnnnnnnnnnnnnnnnnnnnnnnnnnnnnnnnnnnnnnnnnnnnnnnnnnnnnnnnnnnnnnnnnnnnnnnnnnnnnnnnnnnnnnnnnnnnnnnnnnnnnnnnnnnnnnnnnnnnnnnnnnnnnnnnnnnnnnnnnnnnnnnnnnnnnnnnnnnnnnnnnnnnnnnnnnnnnnnnnnnnnnnnnnnnnnnnnnnnnnnnnnnnnnnnnnnnnnnnnnnnnnnnnnnnnnnnnnnnnnnnnnnnnnnnnnnnnnnnnnnnnnnnnnnnnnnnnnnnnnnnnnnnnnnnnnnnnnnnnnnnnnnnnnnnnnnnnnnnnnnnnnnnnnnnnnnnnnnnnnnnnnnnnnnnnnnnnnnnnnnnnnnnnnnnnnnnnnnnnnnnnnnnnnnnnnnnnnnnnnnnnnnnnnnnnnnnnnnnnnnnnnnnnnnnnnnnnnnnnnnnnnnnnnnnnnnnnnnnnnnnnnnnnnnnnnnnnnnnnnnnnnnnnnnnnnnnnnnnnnnnnnnnnnnnnnnnnnnnnnnnnnnnnnnnnnnnnnnnnnnnnnnnnnnnnnnnnnnnnnnnnnnnnnnnnnnnnnnnnnnnnnnnnnnnnnnnnnnnnnnnnnnnnnnnnnnnnnnnnnnnnnnnnnnnnnnnnnnnnnnnnnnnnnnnnnnnnnnnnnnnnnnnnnnnnnnnnnnnnnnnnnnnnnnnnnnnnnnnnnnnnnnnnnnnnnnnnnnnnnnnnnnnnnnnnnnnnnnnnnnnnnnnnnnnnnnnnnnnnnnnnnnnnnnnnnnnnnnnnnnnnnnnnnnnnnnnnnnnnnnnnnnnnnnnnnnnnnnnnnnnnnnnnnnnnnnnnnnnnnnnnnnnnnnnnnnnnnnnnnnnnnnnnnnnnnnnnnnnnnnnnnnnnnnnnnnnnnnnnnnnnnnnnnnnnnnnnnnnnnnnnnnnnnnnnnnnnnnnnnnnnnnnnnnnnnnnnnnnnnnnnnnnnnnnnnnnnnnnnnnnnnnnnnnnnnnnnnnnnnnnnnnnnnnnnnnnnnnnnnnnnnnnnnnnnnnnnnnnnnnnnnnnnnnnnnnnnnnnnnnnnnnnnnnnnnnnnnnnnnnnnnnnnnnnnnnnnnnnnnnnnnnnnnnnnnnnnnnnnnnnnnnnnnnnnnnnnnnnnnnnnnnnnnnnnnnnnnnnnnnnnnnnnnnnnnnnnnnnnnnnnnnnnnnnnnnnnnnnnnnnnnnnnnnnnnnnnnnnnnnnnnnnnnnnnnnnnnnnnnnnnnnnnnnnnnnnnnnnnnnnnnnnnnnnnnnnnnnnnnnnnnnnnnnnnnnnnnnnnnnnnnnnnnnnnnnnnnnnnnnnnnnnnnnnnnnnnnnnnnnnnnnnnnnnnnnnnnnnnnnnnnnnnnnnnnnnnnnnnnnnnnnnnnnnnnnnnnnnnnnnnnnnnnnnnnnnnnnnnnnnnnnnnnnnnnnnnnnnnnnnnnnnnnnnnnnnnnnnnnnnnnnnnnnnnnnnnnnnnnnnnnnnnnnnnnnnnnnnnnnnnnnnnnnnnnnnnnnnnnnnnnnnnnnnnnnnnnnnnnnnnnnnnnnnnnnnnnnnnnnnnnnnnnnnnnnnnnnnnnnnnnnnnnnnnnnnnnnnnnnnnnnnnnnnnnnnnnnnnnnnnnnnnnnnnnnnnnnnnnnnnnnnnnnnnnnnnnnnnnnnnnnnnnnnnnnnnnnnnnnnnnnnnnnnnnnnnnnnnnnnnnnnnnnnnnnnnnnnnnnnnnnnnnnnnnnnnnnnnnnnnnnnnnnnnnnnnnnnnnnnnnnnnnnnnnnnnnnnnnnnnnnnnnnnnnnnnnnnnnnnnnnnnnnnnnnnnnnnnnnnnnnnnnnnnnnnnnnnnnnnnnnnnnnnnnnnnnnnnnnnnnnnnnnnnnnnnnnnnnnnnnnnnnnnnnnnnnnnnnnnnnnnnnnnnnnnnnnnnnnnnnnnnnnnnnnnnnnnnnnnnnnnnnnnnnnnnnnnnnnnnnnnnnnnnnnnnnnnnnnnnnnnnnnnnnnnnnnnnnnnnnnnnnnnnnnnnnnnnnnnnnnnnnnnnnnnnnnnnnnnnnnnnnnnnnnnnnnnnnnnnnnnnnnnnnnnnnnnnnnnnnnnnnnnnnnnnnnnnnnnnnnnnnnnnnnnnnnnnnnnnnnnnnnnnnnnnnnnnnnnnnnnnnnnnnnnnnnnnnnnnnnnnnnnnnnnnnnnnnnnnnnnnnnnnnnnnnnnnnnnnnnnnnnnnnnnnnnnnnnnnnnnnnnnnnnnnnnnnnnnnnnnnnnnnnnnnnnnnnnnnnnnnnnnnnnnnnnnnnnnnnnnnnnnnnnnnnnnnnnnnnnnnnnnnnnnnnnnnnnnnnnnnnnnnnnnnnnnnnnnnnnnnnnnnnnnnnnnnnnnnnnnnnnnnnnnnnnnnnnnnnnnnnnnnnnnnnnnnnnnnnnnnnnnnnnnnnnnnnnnnnnnnnnnnnnnnnnnnnnnnnnnnnnnnnnnnnnnnnnnnnnnnnnnnnnnnnnnnnnnnnnnnnnnnnnnnnnnnnnnnnnnnnnnnnnnnnnnnnnnnnnnnnnnnnnnnnnnnnnnnnnnnnnnnnnnnnnnnnnnnnnnnnnnnnnnnnnnnnnnnnnnnnnnnnnnnnnnnnnnnnnnnnnnnnnnnnnnnnnnnnnnnnnnnnnnnnnnnnnnnnnnnnnnnnnnnnnnnnnnnnnnnnnnnnnnnnnnnnnnnnnnnnnnnnnnnnnnnnnnnnnnnnnnnnnnnnnnnnnnnnnnnnnnnnnnnnnnnnnnnnnnnnnnnnnnnnnnnnnnnnnnnnnnnnnnnnnnnnnnnnnnnnnnnnnnnnnnnnnnnnnnnnnnnnnnnnnnnnnnnnnnnnnnnnnnnnnnnnnnnnnnnnnnnnnnnnnnnnnnnnnnnnnnnnnnnnnnnnnnnnnnnnnnnnnnnnnnnnnnnnnnnnnnnnnnnnnnnnnnnnnnnnnnnnnnnnnnnnnnnnnnnnnnnnnnnnnnnnnnnnnnnnnnnnnnnnnnnnnnnnnnnnnnnnnnnnnnnnnnnnnnnnnnnnnnnnnnnnnnnnnnnnnnnnnnnnnnnnnnnnnnnnnnnnnnnnnnnnnnnnnnnnnnnnnnnnnnnnnnnnnnnnnnnnnnnnnnnnnnnnnnnnnnnnnnnnnnnnnnnnnnnnnnnnnnnnnnnnnnnnnnnnnnnnnnnnnnnnnnnnnnnnnnnnnnnnnnnnnnnnnnnnnnnnnnnnnnnnnnnnnnnnnnnnnnnnnnnnnnnnnnnnnnnnnnnnnnnnnnnnnnnnnnnnnnnnnnnnnnnnnnnnnnnnnnnnnnnnnnnnnnnnnnnnnnnnnnnnnnnnnnnnnnnnnnnnnnnnnnnnnnnnnnnnnnnnnnnnnnnnnnnnnnnnnnnnnnnnnnnnnnnnnnnnnnnnnnnnnnnnnnnnnnnnnnnnnnnnnnnnnnnnnnnnnnnnnnnnnnnnnnnnnnnnnnnnnnnnnnnnnnnnnnnnnnnnnnnnnnnnnnnnnnnnnnnnnnnnnnnnnnnnnnnnnnnnnnnnnnnnnnnnnnnnnnnnnnnnnnnnnnnnnnnnnnnnnnnnnnnnnnnnnnnnnnnnnnnnnnnnnnnnnnnnnnnnnnnnnnnnnnnnnnnnnnnnnnnnnnnnnnnnnnnnnnnnnnnnnnnnnnnnnnnnnnnnnnnnnnnnnnnnnnnnnnnnnnnnnnnnnnnnnnnnnnnnnnnnnnnnnnnnnnnnnnnnnnnnnnnnnnnnnnnnnnnnnnnnnnnnnnnnnnnnnnnnnnnnnnnnnnnnnnnnnnnnnnnnnnnnnnnnnnnnnnnnnnnnnnnnnnnnnnnnnnnnnnnnnnnnnnnnnnnnnnnnnnnnnnnnnnnnnnnnnnnnnnnnnnnnnnnnnnnnnnnnnnnnnnnnnnnnnnnnnnnnnnnnnnnnnnnnnnnnnnnnnnnnnnnnnnnnnnnnnnnnnnnnnnnnnnnnnnnnnnnnnnnnnnnnnnnnnnnnnnnnnnnnnnnnnnnnnnnnnnnnnnnnnnnnnnnnnnnnnnnnnnnnnnnnnnnnnnnnnnnnnnnnnnnnnnnnnnnnnnnnnnnnnnnnnnnnnnnnnnnnnnnnnnnnnnnnnnnnnnnnnnnnnnnnnnnnnnnnnnnnnnnnnnnnnnnnnnnnnnnnnnnnnnnnnnnnnnnnnnnnnnnnnnnnnnnnnnnnnnnnnnnnnnnnnnnnnnnnnnnnnnnnnnnnnnnnnnnnnnnnnnnnnnnnnnnnnnnnnnnnnnnnnnnnnnnnnnnnnnnnnnnnnnnnnnnnnnnnnnnnnnnnnnnnnnnnnnnnnnnnnnnnnnnnnnnnnnnnnnnnnnnnnnnnnnnnnnnnnnnnnnnnnnnnnnnnnnnnnnnnnnnnnnnnnnnnnnnnnnnnnnnnnnnnnnnnnnnnnnnnnnnnnnnnnnnnnnnnnnnnnnnnnnnnnnnnnnnnnnnnnnnnnnnnnnnnnnnnnnnnnnnnnnnnnnnnnnnnnnnnnnnnnnnnnnnnnnnnnnnnnnnnnnnnnnnnnnnnnnnnnnnnnnnnnnnnnnnnnnnnnnnnnnnnnnnnnnnnnnnnnnnnnnnnnnnnnnnnnnnnnnnnnnnnnnnnnnnnnnnnnnnnnnnnnnnnnnnnnnnnnnnnnnnnnnnnnnnnnnnnnnnnnnnnnnnnnnnnnnnnnnnnnnnnnnnnnnnnnnnnnnnnnnnnnnnnnnnnnnnnnnnnnnnnnnnnnnnnnnnnnnnnnnnnnnnnnnnnnnnnnnnnnnnnnnnnnnnnnnnnnnnnnnnnnnnnnnnnnnnnnnnnnnnnnnnnnnnnnnnnnnnnnnnnnnnnnnnnnnnnnnnnnnnnnnnnnnnnnnnnnnnnnnnnnnnnnnnnnnnnnnnnnnnnnnnnnnnnnnnnnnnnnnnnnnnnnnnnnnnnnnnnnnnnnnnnnnnnnnnnnnnnnnnnnnnnnnnnnnnnnnnnnnnnnnnnnnnnnnnnnnnnnnnnnnnnnnnnnnnnnnnnnnnnnnnnnnnnnnnnnnnnnnnnnnnnnnnnnnnnnnnnnnnnnnnnnnnnnnnnnnnnnnnnnnnnnnnnnnnnnnnnnnnnnnnnnnnnnnnnnnnnnnnnnnnnnnnnnnnnnnnnnnnnnnnnnnnnnnnnnnnnnnnnnnnnnnnnnnnnnnnnnnnnnnnnnnnnnnnnnnnnnnnnnnnnnnnnnnnnnnnnnnnnnnnnnnnnnnnnnnnnnnnnnnnnnnnnnnnnnnnnnnnnnnnnnnnnnnnnnnnnnnnnnnnnnnnnnnnnnnnnnnnnnnnnnnnnnnnnnnnnnnnnnnnnnnnnnnnnnnnnnnnnnnnnnnnnnnnnnnnnnnnnnnnnnnnnnnnnnnnnnnnnnnnnnnnnnnnnnnnnnnnnnnnnnnnnnnnnnnnnnnnnnnnnnnnnnnnnnnnnnnnnnnnnnnnnnnnnnnnnnnnnnnnnnnnnnnnnnnnnnnnnnnnnnnnnnnnnnnnnnnnnnnnnnnnnnnnnnnnnnnnnnnnnnnnnnnnnnnnnnnnnnnnnnnnnnnnnnnnnnnnnnnnnnnnnnnnnnnnnnnnnnnnnnnnnnnnnnnnnnnnnnnnnnnnnnnnnnnnnnnnnnnnnnnnnnnnnnnnnnnnnnnnnnnnnnnnnnnnnnnnnnnnnnnnnnnnnnnnnnnnnnnnnnnnnnnnnnnnnnnnnnnnnnnnnnnnnnnnnnnnnnnnnnnnnnnnnnnnnnnnnnnnnnnnnnnnnnnnnnnnnnnnnnnnnnnnnnnnnnnnnnnnnnnnnnnnnnnnnnnnnnnnnnnnnnnnnnnnnnnnnnnnnnnnnnnnnnnnnnnnnnnnnnnnnnnnnnnnnnnnnnnnnnnnnnnnnnnnnnnnnnnnnnnnnnnnnnnnnnnnnnnnnnnnnnnnnnnnnnnnnnnnnnnnnnnnnnnnnnnnnnnnnnnnnnnnnnnnnnnnnnnnnnnnnnnnnnnnnnnnnnnnnnnnnnnnnnnnnnnnnnnnnnnnnnnnnnnnnnnnnnnnnnnnnnnnnnnnnnnnnnnnnnnnnnnnnnnnnnnnnnnnnnnnnnnnnnnnnnnnnnnnnnnnnnnnnnnnnnnnnnnnnnnnnnnnnnnnnnnnnnnnnnnnnnnnnnnnnnnnnnnnnnnnnnnnnnnnnnnnnnnnnnnnnnnnnnnnnnnnnnnnnnnnnnnnnnnnnnnnnnnnnnnnnnnnnnnnnnnnnnnnnnnnnnnnnnnnnnnnnnnnnnnnnnnnnnnnnnnnnnnnnnnnnnnnnnnnnnnnnnnnnnnnnnnnnnnnnnnnnnnnnnnnnnnnnnnnnnnnnnnnnnnnnnnnnnnnnnnnnnnnnnnnnnnnnnnnnnnnnnnnnnnnnnnnnnnnnnnnnnnnnnnnnnnnnnnnnnnnnnnnnnnnnnnnnnnnnnnnnnnnnnnnnnnnnnnnnnnnnnnnnnnnnnnnnnnnnnnnnnnnnnnnnnnnnnnnnnnnnnnnnnnnnnnnnnnnnnnnnnnnnnnnnnnnnnnnnnnnnnnnnnnnnnnnnnnnnnnnnnnnnnnnnnnnnnnnnnnnnnnnnnnnnnnnnnnnnnnnnnnnnnnnnnnnnnnnnnnnnnnnnnnnnnnnnnnnnnnnnnnnnnnnnnnnnnnnnnnnnnnnnnnnnnnnnnnnnnnnnnnnnnnnnnnnnnnnnnnnnnnnnnnnnnnnnnnnnnnnnnnnnnnnnnnnnnnnnnnnnnnnnnnnnnnnnnnnnnnnnnnnnnnnnnnnnnnnnnnnnnnnnnnnnnnnnnnnnnnnnnnnnnnnnnnnnnnnnnnnnnnnnnnnnnnnnnnnnnnnnnnnnnnnnnnnnnnnnnnnnnnnnnnnnnnnnnnnnnnnnnnnnnnnnnnnnnnnnnnnnnnnnnnnnnnnnnnnnnnnnnnnnnnnnnnnnnnnnnnnnnnnnnnnnnnnnnnnnnnnnnnnnnnnnnnnnnnnnnnnnnnnnnnnnnnnnnnnnnnnnnnnnnnnnnnnnnnnnnnnnnnnnnnnnnnnnnnnnnnnnnnnnnnnnnnnnnnnnnnnnnnnnnnnnnnnnnnnnnnnnnnnnnnnnnnnnnnnnnnnnnnnnnnnnnnnnnnnnnnnnnnnnnnnnnnnnnnnnnnnnnnnnnnnnnnnnnnnnnnnnnnnnnnnnnnnnnnnnnnnnnnnnnnnnnnnnnnnnnnnnnnnnnnnnnnnnnnnnnnnnnnnnnnnnnnnnnnnnnnnnnnnnnnnnnnnnnnnnnnnnnnnnnnnnnnnnnnnnnnnnnnnnnnnnnnnnnnnnnnnnnnnnnnnnnnnnnnnnnnnnnnnnnnnnnnnnnnnnnnnnnnnnnnnnnnnnnnnnnnnnnnnnnnnnnnnnnnnnnnnnnnnnnnnnnnnnnnnnnnnnnnnnnnnnnnnnnnnnnnnnnnnnnnnnnnnnnnnnnnnnnnnnnnnnnnnnnnnnnnnnnnnnnnnnnnnnnnnnnnnnnnnnnnnnnnnnnnnnnnnnnnnnnnnnnnnnnnnnnnnnnnnnnnnnnnnnnnnnnnnnnnnnnnnnnnnnnnnnnnnnnnnnnnnnnnnnnnnnnnnnnnnnnnnnnnnnnnnnnnnnnnnnnnnnnnnnnnnnnnnnnnnnnnnnnnnnnnnnnnnnnnnnnnnnnnnnnnnnnnnnnnnnnnnnnnnnnnnnnnnnnnnnnnnnnnnnnnnnnnnnnnnnnnnnnnnnnnnnnnnnnnnnnnnnnnnnnnnnnnnnnnnnnnnnnnnnnnnnnnnnnnnnnnnnnnnnnnnnnnnnnnnnnnnnnnnnnnnnnnnnnnnnnnnnnnnnnnnnnnnnnnnnnnnnnnnnnnnnnnnnnnnnnnnnnnnnnnnnnnnnnnnnnnnnnnnnnnnnnnnnnnnnnnnnnnnnnnnnnnnnnnnnnnnnnnnnnnnnnnnnnnnnnnnnnnnnnnnnnnnnnnnnnnnnnnnnnnnnnnnnnnnnnnnnnnnnnnnnnnnnnnnnnnnnnnnnnnnnnnnnnnnnnnnnnnnnnnnnnnnnnnnnnnnnnnnnnnnnnnnnnnnnnnnnnnnnnnnnnnnnnnnnnnnnnnnnnnnnnnnnnnnnnnnnnnnnnnnnnnnnnnnnnnnnnnnnnnnnnnnnnnnnnnnnnnnnnnnnnnnnnnnnnnnnnnnnnnnnnnnnnnnnnnnnnnnnnnnnnnnnnnnnnnnnnnnnnnnnnnnnnnnnnnnnnnnnnnnnnnnnnnnnnnnnnnnnnnnnnnnnnnnnnnnnnnnnnnnnnnnnnnnnnnnnnnnnnnnnnnnnnnnnnnnnnnnnnnnnnnnnnnnnnnnnnnnnnnnnnnnnnnnnnnnnnnnnnnnnnnnnnnnnnnnnnnnnnnnnnnnnnnnnnnnnnnnnnnnnnnnnnnnnnnnnnnnnnnnnnnnnnnnnnnnnnnnnnnnnnnnnnnnnnnnnnnnnnnnnnnnnnnnnnnnnnnnnnnnnnnnnnnnnnnnnnnnnnnnnnnnnnnnnnnnnnnnnnnnnnnnnnnnnnnnnnnnnnnnnnnnnnnnnnnnnnnnnnnnnnnnnnnnnnnnnnnnnnnnnnnnnnnnnnnnnnnnnnnnnnnnnnnnnnnnnnnnnnnnnnnnnnnnnnnnnnnnnnnnnnnnnnnnnnnnnnnnnnnnnnnnnnnnnnnnnnnnnnnnnnnnnnnnnnnnnnnnnnnnnnnnnnnnnnnnnnnnnnnnnnnnnnnnnnnnnnnnnnnnnnnnnnnnnnnnnnnnnnnnnnnnnnnnnnnnnnnnnnnnnnnnnnnnnnnnnnnnnnnnnnnnnnnnnnnnnnnnnnnnnnnnnnnnnnnnnnnnnnnnnnnnnnnnnnnnnnnnnnnnnnnnnnnnnnnnnnnnnnnnnnnnnnnnnnnnnnnnnnnnnnnnnnnnnnnnnnnnnnnnnnnnnnnnnnnnnnnnnnnnnnnnnnnnnnnnnnnnnnnnnnnnnnnnnnnnnnnnnnnnnnnnnnnnnnnnnnnnnnnnnnnnnnnnnnnnnnnnnnnnnnnnnnnnnnnnnnnnnnnnnnnnnnnnnnnnnnnnnnnnnnnnnnnnnnnnnnnnnnnnnnnnnnnnnnnnnnnnnnnnnnnnnnnnnnnnnnnnnnnnnnnnnnnnnnnnnnnnnnnnnnnnnnnnnnnnnnnnnnnnnnnnnnnnnnnnnnnnnnnnnnnnnnnnnnnnnnnnnnnnnnnnnnnnnnnnnnnnnnnnnnnnnnnnnnnnnnnnnnnnnnnnnnnnnnnnnnnnnnnnnnnnnnnnnnnnnnnnnnnnnnnnnnnnnnnnnnnnnnnnnnnnnnnnnnnnnnnnnnnnnnnnnnnnnnnnnnnnnnnnnnnnnnnnnnnnnnnnnnnnnnnnnnnnnnnnnnnnnnnnnnnnnnnnnnnnnnnnnnnnnnnnnnnnnnnnnnnnnnnnnnnnnnnnnnnnnnnnnnnnnnnnnnnnnnnnnnnnnnnnnnnnnnnnnnnnnnnnnnnnnnnnnnnnnnnnnnnnnnnnnnnnnnnnnnnnnnnnnnnnnnnnnnnnnnnnnnnnnnnnnnnnnnnnnnnnnnnnnnnnnnnnnnnnnnnnnnnnnnnnnnnnnnnnnnnnnnnnnnnnnnnnnnnnnnnnnnnnnnnnnnnnnnnnnnnnnnnnnnnnnnnnnnnnnnnnnnnnnnnnnnnnnnnnnnnnnnnnnnnnnnnnnnnnnnnnnnnnnnnnnnnnnnnnnnnnnnnnnnnnnnnnnnnnnnnnnnnnnnnnnnnnnnnnnnnnnnnnnnnnnnnnnnnnnnnnnnnnnnnnnnnnnnnnnnnnnnnnnnnnnnnnnnnnnnnnnnnnnnnnnnnnnnnnnnnnnnnnnnnnnnnnnnnnnnnnnnnnnnnnnnnnnnnnnnnnnnnnnnnnnnnnnnnnnnnnnnnnnnnnnnnnnnnnnnnnnnnnnnnnnnnnnnnnnnnnnnnnnnnnnnnnnnnnnnnnnnnnnnnnnnnnnnnnnnnnnnnnnnnnnnnnnnnnnnnnnnnnnnnnnnnnnnnnnnnnnnnnnnnnnnnnnnnnnnnnnnnnnnnnnnnnnnnnnnnnnnnnnnnnnnnnnnnnnnnnnnnnnnnnnnnnnnnnnnnnnnnnnnnnnnnnnnnnnnnnnnnnnnnnnnnnnnnnnnnnnnnnnnnnnnnnnnnnnnnnnnnnnnnnnnnnnnnnnnnnnnnnnnnnnnnnnnnnnnnnnnnnnnnnnnnnnnnnnnnnnnnnnnnnnnnnnnnnnnnnnnnnnnnnnnnnnnnnnnnnnnnnnnnnnnnnnnnnnnnnnnnnnnnnnnnnnnnnnnnnnnnnnnnnnnnnnnnnnnnnnnnnnnnnnnnnnnnnnnnnnnnnnnnnnnnnnnnnnnnnnnnnnnnnnnnnnnnnnnnnnnnnnnnnnnnnnnnnnnnnnnnnnnnnnnnnnnnnnnnnnnnnnnnnnnnnnnnnnnnnnnnnnnnnnnnnnnnnnnnnnnnnnnnnnnnnnnnnnnnnnnnnnnnnnnnnnnnnnnnnnnnnnnnnnnnnnnnnnnnnnnnnnnnnnnnnnnnnnnnnnnnnnnnnnnnnnnnnnnnnnnnnnnnnnnnnnnnnnnnnnnnnnnnnnnnnnnnnnnnnnnnnnnnnnnnnnnnnnnnnnnnnnnnnnnnnnnnnnnnnnnnnnnnnnnnnnnnnnnnnnnnnnnnnnnnnnnnnnnnnnnnnnnnnnnnnnnnnnnnnnnnnnnnnnnnnnnnnnnnnnnnnnnnnnnnnnnnnnnnnnnnnnnnnnnnnnnnnnnnnnnnnnnnnnnnnnnnnnnnnnnnnnnnnnnnnnnnnnnnnnnnnnnnnnnnnnnnnnnnnnnnnnnnnnnnnnnnnnnnnnnnnnnnnnnnnnnnnnnnnnnnnnnnnnnnnnnnnnnnnnnnnnnnnnnnnnnnnnnnnnnnnnnnnnnnnnnnnnnnnnnnnnnnnnnnnnnnnnnnnnnnnnnnnnnnnnnnnnnnnnnnnnnnnnnnnnnnnnnnnnnnnnnnnnnnnnnnnnnnnnnnnnnnnnnnnnnnnnnnnnnnnnnnnnnnnnnnnnnnnnnnnnnnnnnnnnnnnnnnnnnnnnnnnnnnnnnnnnnnnnnnnnnnnnnnnnnnnnnnnnnnnnnnnnnnnnnnnnnnnnnnnnnnnnnnnnnnnnnnnnnnnnnnnnnnnnnnnnnnnnnnnnnnnnnnnnnnnnnnnnnnnnnnnnnnnnnnnnnnnnnnnnnnnnnnnnnnnnnnnnnnnnnnnnnnnnnnnnnnnnnnnnnnnnnnnnnnnnnnnnnnnnnnnnnnnnnnnnnnnnnnnnnnnnnnnnnnnnnnnnnnnnnnnnnnnnnnnnnnnnnnnnnnnnnnnnnnnnnnnnnnnnnnnnnnnnnnnnnnnnnnnnnnnnnnnnnnnnnnnnnnnnnnnnnnnnnnnnnnnnnnnnnnnnnnnnnnnnnnnnnnnnnnnnnnnnnnnnnnnnnnnnnnnnnnnnnnnnnnnnnnnnnnnnnnnnnnnnnnnnnnnnnnnnnnnnnnnnnnnnnnnnnnnnnnnnnnnnnnnnnnnnnnnnnnnnnnnnnnnnnnnnnnnnnnnnnnnnnnnnnnnnnnnnnnnnnnnnnnnnnnnnnnnnnnnnnnnnnnnnnnnnnnnnnnnnnnnnnnnnnnnnnnnnnnnnnnnnnnnnnnnnnnnnnnnnnnnnnnnnnnnnnnnnnnnnnnnnnnnnnnnnnnnnnnnnnnnnnnnnnnnnnnnnnnnnnnnnnnnnnnnnnnnnnnnnnnnnnnnnnnnnnnnnnnnnnnnnnnnnnnnnnnnnnnnnnnnnnnnnnnnnnnnnnnnnnnnnnnnnnnnnnnnnnnnnnnnnnnnnnnnnnnnnnnnnnnnnnnnnnnnnnnnnnnnnnnnnnnnnnnnnnnnnnnnnnnnnnnnnnnnnnnnnnnnnnnnnnnnnnnnnnnnnnnnnnnnnnnnnnnnnnnnnnnnnnnnnnnnnnnnnnnnnnnnnnnnnnnnnnnnnnnnnnnnnnnnnnnnnnnnnnnnnnnnnnnnnnnnnnnnnnnnnnnnnnnnnnnnnnnnnnnnnnnnnnnnnnnnnnnnnnnnnnnnnnnnnnnnnnnnnnnnnnnnnnnnnnnnnnnnnnnnnnnnnnnnnnnnnnnnnnnnnnnnnnnnnnnnnnnnnnnnnnnnnnnnnnnnnnnnnnnnnnnnnnnnnnnnnnnnnnnnnnnnnnnnnnnnnnnnnnnnnnnnnnnnnnnnnnnnnnnnnnnnnnnnnnnnnnnnnnnnnnnnnnnnnnnnnnnnnnnnnnnnnnnnnnnnnnnnnnnnnnnnnnnnnnnnnnnnnnnnnnnnnnnnnnnnnnnnnnnnnnnnnnnnnnnnnnnnnnnnnnnnnnnnnnnnnnnnnnnnnnnnnnnnnnnnnnnnnnnnnnnnnnnnnnnnnnnnnnnnnnnnnnnnnnnnnnnnnnnnnnnnnnnnnnnnnnnnnnnnnnnnnnnnnnnnnnnnnnnnnnnnnnnnnnnnnnnnnnnnnnnnnnnnnnnnnnnnnnnnnnnnnnnnnnnnnnnnnnnnnnnnnnnnnnnnnnnnnnnnnnnnnnnnnnnnnnnnnnnnnnnnnnnnnnnnnnnnnnnnnnnnnnnnnnnnnnnnnnnnnnnnnnnnnnnnnnnnnnnnnnnnnnnnnnnnnnnnnnnnnnnnnnnnnnnnnnnnnnnnnnnnnnnnnnnnnnnnnnnnnnnnnnnnnnnnnnnnnnnnnnnnnnnnnnnnnnnnnnnnnnnnnnnnnnnnnnnnnnnnnnnnnnnnnnnnnnnnnnnnnnnnnnnnnnnnnnnnnnnnnnnnnnnnnnnnnnnnnnnnnnnnnnnnnnnnnnnnnnnnnnnnnnnnnnnnnnnnnnnnnnnnnnnnnnnnnnnnnnnnnnnnnnnnnnnnnnnnnnnnnnnnnnnnnnnnnnnnnnnnnnnnnnnnnnnnnnnnnnnnnnnnnnnnnnnnnnnnnnnnnnnnnnnnnnnnnnnnnnnnnnnnnnnnnnnnnnnnnnnnnnnnnnnnnnnnnnnnnnnnnnnnnnnnnnnnnnnnnnnnnnnnnnnnnnnnnnnnnnnnnnnnnnnnnnnnnnnnnnnnnnnnnnnnnnnnnnnnnnnnnnnnnnnnnnnnnnnnnnnnnnnnnnnnnnnnnnnnnnnnnnnnnnnnnnnnnnnnnnnnnnnnnnnnnnnnnnnnnnnnnnnnnnnnnnnnnnnnnnnnnnnnnnnnnnnnnnnnnnnnnnnnnnnnnnnnnnnnnnnnnnnnnnnnnnnnnnnnnnnnnnnnnnnnnnnnnnnnnnnnnnnnnnnnnnnnnnnnnnnnnnnnnnnnnnnnnnnnnnnnnnnnnnnnnnnnnnnnnnnnnnnnnnnnnnnnnnnnnnnnnnnnnnnnnnnnnnnnnnnnnnnnnnnnnnnnnnnnnnnnnnnnnnnnnnnnnnnnnnnnnnnnnnnnnnnnnnnnnnnnnnnnnnnnnnnnnnnnnnnnnnnnnnnnnnnnnnnnnnnnnnnnnnnnnnnnnnnnnnnnnnnnnnnnnnnnnnnnnnnnnnnnnnnnnnnnnnnnnnnnnnnnnnnnnnnnnnnnnnnnnnnnnnnnnnnnnnnnnnnnnnnnnnnnnnnnnnnnnnnnnnnnnnnnnnnnnnnnnnnnnnnnnnnnnnnnnnnnnnnnnnnnnnnnnnnnnnnnnnnnnnnnnnnnnnnnnnnnnnnnnnnnnnnnnnnnnnnnnnnnnnnnnnnnnnnnnnnnnnnnnnnnnnnnnnnnnnnnnnnnnnnnnnnnnnnnnnnnnnnnnnnnnnnnnnnnnnnnnnnnnnnnnnnnnnnnnnnnnnnnnnnnnnnnnnnnnnnnnnnnnnnnnnnnnnnnnnnnnnnnnnnnnnnnnnnnnnnnnnnnnnnnnnnnnnnnnnnnnnnnnnnnnnnnnnnnnnnnnnnnnnnnnnnnnnnnnnnnnnnnnnnnnnnnnnnnnnnnnnnnnnnnnnnnnnnnnnnnnnnnnnnnnnnnnnnnnnnnnnnnnnnnnnnnnnnnnnnnnnnnnnnnnnnnnnnnnnnnnnnnnnnnnnnnnnnnnnnnnnnnnnnnnnnnnnnnnnnnnnnnnnnnnnnnnnnnnnnnnnnnnnnnnnnnnnnnnnnnnnnnnnnnnnnnnnnnnnnnnnnnnnnnnnnnnnnnnnnnnnnnnnnnnnnnnnnnnnnnnnnnnnnnnnnnnnnnnnnnnnnnnnnnnnnnnnnnnnnnnnnnnnnnnnnnnnnnnnnnnnnnnnnnnnnnnnnnnnnnnnnnnnnnnnnnnnnnnnnnnnnnnnnnnnnnnnnnnnnnnnnnnnnnnnnnnnnnnnnnnnnnnnnnnnnnnnnnnnnnnnnnnnnnnnnnnnnnnnnnnnnnnnnnnnnnnnnnnnnnnnnnnnnnnnnnnnnnnnnnnnnnnnnnnnnnnnnnnnnnnnnnnnnnnnnnnnnnnnnnnnnnnnnnnnnnnnnnnnnnnnnnnnnnnnnnnnnnnnnnnnnnnnnnnnnnnnnnnnnnnnnnnnnnnnnnnnnnnnnnnnnnnnnnnnnnnnnnnnnnnnnnnnnnnnnnnnnnnnnnnnnnnnnnnnnnnnnnnnnnnnnnnnnnnnnnnnnnnnnnnnnnnnnnnnnnnnnnnnnnnnnnnnnnnnnnnnnnnnnnnnnnnnnnnnnnnnnnnnnnnnnnnnnnnnnnnnnnnnnnnnnnnnnnnnnnnnnnnnnnnnnnnnnnnnnnnnnnnnnnnnnnnnnnnnnnnnnnnnnnnnnnnnnnnnnnnnnnnnnnnnnnnnnnnnnnnnnnnnnnnnnnnnnnnnnnnnnnnnnnnnnnnnnnnnnnnnnnnnnnnnnnnnnnnnnnnnnnnnnnnnnnnnnnnnnnnnnnnnnnnnnnnnnnnnnnnnnnnnnnnnnnnnnnnnnnnnnnnnnnnnnnnnnnnnnnnnnnnnnnnnnnnnnnnnnnnnnnnnnnnnnnnnnnnnnnnnnnnnnnnnnnnnnnnnnnnnnnnnnnnnnnnnnnnnnnnnnnnnnnnnnnnnnnnnnnnnnnnnnnnnnnnnnnnnnnnnnnnnnnnnnnnnnnnnnnnnnnnnnnnnnnnnnnnnnnnnnnnnnnnnnnnnnnnnnnnnnnnnnnnnnnnnnnnnnnnnnnnnnnnnnnnnnnnnnnnnnnnnnnnnnnnnnnnnnnnnnnnnnnnnnnnnnnnnnnnnnnnnnnnnnnnnnnnnnnnnnnnnnnnnnnnnnnnnnnnnnnnnnnnnnnnnnnnnnnnnnnnnnnnnnnnnnnnnnnnnnnnnnnnnnnnnnnnnnnnnnnnnnnnnnnnnnnnnnnnnnnnnnnnnnnnnnnnnnnnnnnnnnnnnnnnnnnnnnnnnnnnnnnnnnnnnnnnnnnnnnnnnnnnnnnnnnnnnnnnnnnnnnnnnnnnnnnnnnnnnnnnnnnnnnnnnnnnnnnnnnnnnnnnnnnnnnnnnnnnnnnnnnnnnnnnnnnnnnnnnnnnnnnnnnnnnnnnnnnnnnnnnnnnnnnnnnnnnnnnnnnnnnnnnnnnnnnnnnnnnnnnnnnnnnnnnnnnnnnnnnnnnnnnnnnnnnnnnnnnnnnnnnnnnnnnnnnnnnnnnnnnnnnnnnnnnnnnnnnnnnnnnnnnnnnnnnnnnnnnnnnnnnnnnnnnnnnnnnnnnnnnnnnnnnnnnnnnnnnnnnnnnnnnnnnnnnnnnnnnnnnnnnnnnnnnnnnnnnnnnnnnnnnnnnnnnnnnnnnnnnnnnnnnnnnnnnnnnnnnnnnnnnnnnnnnnnnnnnnnnnnnnnnnnnnnnnnnnnnnnnnnnnnnnnnnnnnnnnnnnnnnnnnnnnnnnnnnnnnnnnnnnnnnnnnnnnnnnnnnnnnnnnnnnnnnnnnnnnnnnnnnnnnnnnnnnnnnnnnnnnnnnnnnnnnnnnnnnnnnnnnnnnnnnnnnnnnnnnnnnnnnnnnnnnnnnnnnnnnnnnnnnnnnnnnnnnnnnnnnnnnnnnnnnnnnnnnnnnnnnnnnnnnnnnnnnnnnnnnnnnnnnnnnnnnnnnnnnnnnnnnnnnnnnnnnnnnnnnnnnnnnnnnnnnnnnnnnnnnnnnnnnnnnnnnnnnnnnnnnnnnnnnnnnnnnnnnnnnnnnnnnnnnnnnnnnnnnnnnnnnnnnnnnnnnnnnnnnnnnnnnnnnnnnnnnnnnnnnnnnnnnnnnnnnnnnnnnnnnnnnnnnnnnnnnnnnnnnnnnnnnnnnnnnnnnnnnnnnnnnnnnnnnnnnnnnnnnnnnnnnnnnnnnnnnnnnnnnnnnnnnnnnnnnnnnnnnnnnnnnnnnnnnnnnnnnnnnnnnnnnnnnnnnnnnnnnnnnnnnnnnnnnnnnnnnnnnnnnnnnnnnnnnnnnnnnnnnnnnnnnnnnnnnnnnnnnnnnnnnnnnnnnnnnnnnnnnnnnnnnnnnnnnnnnnnnnnnnnnnnnnnnnnnnnnnnnnnnnnnnnnnnnnnnnnnnnnnnnnnnnnnnnnnnnnnnnnnnnnnnnnnnnnnnnnnnnnnnnnnnnnnnnnnnnnnnnnnnnnnnnnnnnnnnnnnnnnnnnnnnnnnnnnnnnnnnnnnnnnnnnnnnnnnnnnnnnnnnnnnnnnnnnnnnnnnnnnnnnnnnnnnnnnnnnnnnnnnnnnnnnnnnnnnnnnnnnnnnnnnnnnnnnnnnnnnnnnnnnnnnnnnnnnnnnnnnnnnnnnnnnnnnnnnnnnnnnnnnnnnnnnnnnnnnnnnnnnnnnnnnnnnnnnnnnnnnnnnnnnnnnnnnnnnnnnnnnnnnnnnnnnnnnnnnnnnnnnnnnnnnnnnnnnnnnnnnnnnnnnnnnnnnnnnnnnnnnnnnnnnnnnnnnnnnnnnnnnnnnnnnnnnnnnnnnnnnnnnnnnnnnnnnnnnnnnnnnnnnnnnnnnnnnnnnnnnnnnnnnnnnnnnnnnnnnnnnnnnnnnnnnnnnnnnnnnnnnnnnnnnnnnnnnnnnnnnnnnnnnnnnnnnnnnnnnnnnnnnnnnnnnnnnnnnnnnnnnnnnnnnnnnnnnnnnnnnnnnnnnnnnnnnnnnnnnnnnnnnnnnnnnnnnnnnnnnnnnnnnnnnnnnnnnnnnnnnnnnnnnnnnnnnnnnnnnnnnnnnnnnnnnnnnnnnnnnnnnnnnnnnnnnnnnnnnnnnnnnnnnnnnnnnnnnnnnnnnnnnnnnnnnnnnnnnnnnnnnnnnnnnnnnnnnnnnnnnnnnnnnnnnnnnnnnnnnnnnnnnnnnnnnnnnnnnnnnnnnnnnnnnnnnnnnnnnnnnnnnnnnnnnnnnnnnnnnnnnnnnnnnnnnnnnnnnnnnnnnnnnnnnnnnnnnnnnnnnnnnnnnnnnnnnnnnnnnnnnnnnnnnnnnnnnnnnnnnnnnnnnnnnnnnnnnnnnnnnnnnnnnnnnnnnnnnnnnnnnnnnnnnnnnnnnnnnnnnnnnnnnnnnnnnnnnnnnnnnnnnnnnnnnnnnnnnnnnnnnnnnnnnnnnnnnnnnnnnnnnnnnnnnnnnnnnnnnnnnnnnnnnnnnnnnnnnnnnnnnnnnnnnnnnnnnnnnnnnnnnnnnnnnnnnnnnnnnnnnnnnnnnnnnnnnnnnnnnnnnnnnnnnnnnnnnnnnnnnnnnnnnnnnnnnnnnnnnnnnnnnnnnnnnnnnnnnnnnnnnnnnnnnnnnnnnnnnnnnnnnnnnnnnnnnnnnnnnnnnnnnnnnnnnnnnnnnnnnnnnnnnnnnnnnnnnnnnnnnnnnnnnnnnnnnnnnnnnnnnnnnnnnnnnnnnnnnnnnnnnnnnnnnnnnnnnnnnnnnnnnnnnnnnnnnnnnnnnnnnnnnnnnnnnnnnnnnnnnnnnnnnnnnnnnnnnnnnnnnnnnnnnnnnnnnnnnnnnnnnnnnnnnnnnnnnnnnnnnnnnnnnnnnnnnnnnnnnnnnnnnnnnnnnnnnnnnnnnnnnnnnnnnnnnnnnnnnnnnnnnnnnnnnnnnnnnnnnnnnnnnnnnnnnnnnnnnnnnnnnnnnnnnnnnnnnnnnnnnnnnnnnnnnnnnnnnnnnnnnnnnnnnnnnnnnnnnnnnnnnnnnnnnnnnnnnnnnnnnnnnnnnnnnnnnnnnnnnnnnnnnnnnnnnnnnnnnnnnnnnnnnnnnnnnnnnnnnnnnnnnnnnnnnnnnnnnnnnnnnnnnnnnnnnnnnnnnnnnnnnnnnnnnnnnnnnnnnnnnnnnnnnnnnnnnnnnnnnnnnnnnnnnnnnnnnnnnnnnnnnnnnnnnnnnnnnnnnnnnnnnnnnnnnnnnnnnnnnnnnnnnnnnnnnnnnnnnnnnnnnnnnnnnnnnnnnnnnnnnnnnnnnnnnnnnnnnnnnnnnnnnnnnnnnnnnnnnnnnnnnnnnnnnnnnnnnnnnnnnnnnnnnnnnnnnnnnnnnnnnnnnnnnnnnnnnnnnnnnnnnnnnnnnnnnnnnnnnnnnnnnnnnnnnnnnnnnnnnnnnnnnnnnnnnnnnnnnnnnnnnnnnnnnnnnnnnnnnnnnnnnnnnnnnnnnnnnnnnnnnnnnnnnnnnnnnnnnnnnnnnnnnnnnnnnnnnnnnnnnnnnnnnnnnnnnnnnnnnnnnnnnnnnnnnnnnnnnnnnnnnnnnnnnnnnnnnnnnnnnnnnnnnnnnnnnnnnnnnnnnnnnnnnnnnnnnnnnnnnnnnnnnnnnnnnnnnnnnnnnnnnnnnnnnnnnnnnnnnnnnnnnnnnnnnnnnnnnnnnnnnnnnnnnnnnnnnnnnnnnnnnnnnnnnnnnnnnnnnnnnnnnnnnnnnnnnnnnnnnnnnnnnnnnnnnnnnnnnnnnnnnnnnnnnnnnnnnnnnnnnnnnnnnnnnnnnnnnnnnnnnnnnnnnnnnnnnnnnnnnnnnnnnnnnnnnnnnnnnnnnnnnnnnnnnnnnnnnnnnnnnnnnnnnnnnnnnnnnnnnnnnnnnnnnnnnnnnnnnnnnnnnnnnnnnnnnnnnnnnnnnnnnnnnnnnnnnnnnnnnnnnnnnnnnnnnnnnnnnnnnnnnnnnnnnnnnnnnnnnnnnnnnnnnnnnnnnnnnnnnnnnnnnnnnnnnnnnnnnnnnnnnnnnnnnnnnnnnnnnnnnnnnnnnnnnnnnnnnnnnnnnnnnnnnnnnnnnnnnnnnnnnnnnnnnnnnnnnnnnnnnnnnnnnnnnnnnnnnnnnnnnnnnnnnnnnnnnnnnnnnnnnnnnnnnnnnnnnnnnnnnnnnnnnnnnnnnnnnnnnnnnnnnnnnnnnnnnnnnnnnnnnnnnnnnnnnnnnnnnnnnnnnnnnnnnnnnnnnnnnnnnnnnnnnnnnnnnnnnnnnnnnnnnnnnnnnnnnnnnnnnnnnnnnnnnnnnnnnnnnnnnnnnnnnnnnnnnnnnnnnnnnnnnnnnnnnnnnnnnnnnnnnnnnnnnnnnnnnnnnnnnnnnnnnnnnnnnnnnnnnnnnnnnnnnnnnnnnnnnnnnnnnnnnnnnnnnnnnnnnnnnnnnnnnnnnnnnnnnnnnnnnnnnnnnnnnnnnnnnnnnnnnnnnnnnnnnnnnnnnnnnnnnnnnnnnnnnnnnnnnnnnnnnnnnnnnnnnnnnnnnnnnnnnnnnnnnnnnnnnnnnnnnnnnnnnnnnnnnnnnnnnnnnnnnnnnnnnnnnnnnnnnnnnnnnnnnnnnnnnnnnnnnnnnnnnnnnnnnnnnnnnnnnnnnnnnnnnnnnnnnnnnnnnnnnnnnnnnnnnnnnnnnnnnnnnnnnnnnnnnnnnnnnnnnnnnnnnnnnnnnnnnnnnnnnnnnnnnnnnnnnnnnnnnnnnnnnnnnnnnnnnnnnnnnnnnnnnnnnnnnnnnnnnnnnnnnnnnnnnnnnnnnnnnnnnnnnnnnnnnnnnnnnnnnnnnnnnnnnnnnnnnnnnnnnnnnnnnnnnnnnnnnnnnnnnnnnnnnnnnnnnnnnnnnnnnnnnnnnnnnnnnnnnnnnnnnnnnnnnnnnnnnnnnnnnnnnnnnnnnnnnnnnnnnnnnnnnnnnnnnnnnnnnnnnnnnnnnnnnnnnnnnnnnnnnnnnnnnnnnnnnnnnnnnnnnnnnnnnnnnnnnnnnnnnnnnnnnnnnnnnnnnnnnnnnnnnnnnnnnnnnnnnnnnnnnnnnnnnnnnnnnnnnnnnnnnnnnnnnnnnnnnnnnnnnnnnnnnnnnnnnnnnnnnnnnnnnnnnnnnnnnnnnnnnnnnnnnnnnnnnnnnnnnnnnnnnnnnnnnnnnnnnnnnnnnnnnnnnnnnnnnnnnnnnnnnnnnnnnnnnnnnnnnnnnnnnnnnnnnnnnnnnnnnnnnnnnnnnnnnnnnnnnnnnnnnnnnnnnnnnnnnnnnnnnnnnnnnnnnnnnnnnnnnnnnnnnnnnnnnnnnnnnnnnnnnnnnnnnnnnnnnnnnnnnnnnnnnnnnnnnnnnnnnnnnnnnnnnnnnnnnnnnnnnnnnnnnnnnnnnnnnnnnnnnnnnnnnnnnnnnnnnnnnnnnnnnnnnnnnnnnnnnnnnnnnnnnnnnnnnnnnnnnnnnnnnnnnnnnnnnnnnnnnnnnnnnnnnnnnnnnnnnnnnnnnnnnnnnnnnnnnnnnnnnnnnnnnnnnnnnnnnnnnnnnnnnnnnnnnnnnnnnnnnnnnnnnnnnnnnnnnnnnnnnnnnnnnnnnnnnnnnnnnnnnnnnnnnnnnnnnnnnnnnnnnnnnnnnnnnnnnnnnnnnnnnnnnnnnnnnnnnnnnnnnnnnnnnnnnnnnnnnnnnnnnnnnnnnnnnnnnnnnnnnnnnnnnnnnnnnnnnnnnnnnnnnnnnnnnnnnnnnnnnnnnnnnnnnnnnnnnnnnnnnnnnnnnnnnnnnnnnnnnnnnnnnnnnnnnnnnnnnnnnnnnnnnnnnnnnnnnnnnnnnnnnnnnnnnnnnnnnnnnnnnnnnnnnnnnnnnnnnnnnnnnnnnnnnnnnnnnnnnnnnnnnnnnnnnnnnnnnnnnnnnnnnnnnnnnnnnnnnnnnnnnnnnnnnnnnnnnnnnnnnnnnnnnnnnnnnnnnnnnnnnnnnnnnnnnnnnnnnnnnnnnnnnnnnnnnnnnnnnnnnnnnnnnnnnnnnnnnnnnnnnnnnnnnnnnnnnnnnnnnnnnnnnnnnnnnnnnnnnnnnnnnnnnnnnnnnnnnnnnnnnnnnnnnnnnnnnnnnnnnnnnnnnnnnnnnnnnnnnnnnnnnnnnnnnnnnnnnnnnnnnnnnnnnnnnnnnnnnnnnnnnnnnnnnnnnnnnnnnnnnnnnnnnnnnnnnnnnnnnnnnnnnnnnnnnnnnnnnnnnnnnnnnnnnnnnnnnnnnnnnnnnnnnnnnnnnnnnnnnnnnnnnnnnnnnnnnnnnnnnnnnnnnnnnnnnnnnnnnnnnnnnnnnnnnnnnnnnnnnnnnnnnnnnnnnnnnnnnnnnnnnnnnnnnnnnnnnnnnnnnnnnnnnnnnnnnnnnnnnnnnnnnnnnnnnnnnnnnnnnnnnnnnnnnnnnnnnnnnnnnnnnnnnnnnnnnnnnnnnnnnnnnnnnnnnnnnnnnnnnnnnnnnnnnnnnnnnnnnnnnnnnnnnnnnnnnnnnnnnnnnnnnnnnnnnnnnnnnnnnnnnnnnnnnnnnnnnnnnnnnnnnnnnnnnnnnnnnnnnnnnnnnnnnnnnnnnnnnnnnnnnnnnnnnnnnnnnnnnnnnnnnnnnnnnnnnnnnnnnnnnnnnnnnnnnnnnnnnnnnnnnnnnnnnnnnnnnnnnnnnnnnnnnnnnnnnnnnnnnnnnnnnnnnnnnnnnnnnnnnnnnnnnnnnnnnnnnnnnnnnnnnnnnnnnnnnnnnnnnnnnnnnnnnnnnnnnnnnnnnnnnnnnnnnnnnnnnnnnnnnnnnnnnnnnnnnnnnnnnnnnnnnnnnnnnnnnnnnnnnnnnnnnnnnnnnnnnnnnnnnnnnnnnnnnnnnnnnnnnnnnnnnnnnnnnnnnnnnnnnnnnnnnnnnnnnnnnnnnnnnnnnnnnnnnnnnnnnnnnnnnnnnnnnnnnnnnnnnnnnnnnnnnnnnnnnnnnnnnnnnnnnnnnnnnnnnnnnnnnnnnnnnnnnnnnnnnnnnnnnnnnnnnnnnnnnnnnnnnnnnnnnnnnnnnnnnnnnnnnnnnnnnnnnnnnnnnnnnnnnnnnnnnnnnnnnnnnnnnnnnnnnnnnnnnnnnnnnnnnnnnnnnnnnnnnnnnnnnnnnnnnnnnnnnnnnnnnnnnnnnnnnnnnnnnnnnnnnnnnnnnnnnnnnnnnnnnnnnnnnnnnnnnnnnnnnnnnnnnnnnnnnnnnnnnnnnnnnnnnnnnnnnnnnnnnnnnnnnnnnnnnnnnnnnnnnnnnnnnnnnnnnnnnnnnnnnnnnnnnnnnnnnnnnnnnnnnnnnnnnnnnnnnnnnnnnnnnnnnnnnnnnnnnnnnnnnnnnnnnnnnnnnnnnnnnnnnnnnnnnnnnnnnnnnnnnnnnnnnnnnnnnnnnnnnnnnnnnnnnnnnnnnnnnnnnnnnnnnnnnnnnnnnnnnnnnnnnnnnnnnnnnnnnnnnnnnnnnnnnnnnnnnnnnnnnnnnnnnnnnnnnnnnnnnnnnnnnnnnnnnnnnnnnnnnnnnnnnnnnnnnnnnnnnnnnnnnnnnnnnnnnnnnnnnnnnnnnnnnnnnnnnnnnnnnnnnnnnnnnnnnnnnnnnnnnnnnnnnnnnnnnnnnnnnnnnnnnnnnnnnnnnnnnnnnnnnnnnnnnnnnnnnnnnnnnnnnnnnnnnnnnnnnnnnnnnnnnnnnnnnnnnnnnnnnnnnnnnnnnnnnnnnnnnnnnnnnnnnnnnnnnnnnnnnnnnnnnnnnnnnnnnnnnnnnnnnnnnnnnnnnnnnnnnnnnnnnnnnnnnnnnnnnnnnnnnnnnnnnnnnnnnnnnnnnnnnnnnnnnnnnnnnnnnnnnnnnnnnnnnnnnnnnnnnnnnnnnnnnnnnnnnnnnnnnnnnnnnnnnnnnnnnnnnnnnnnnnnnnnnnnnnnnnnnnnnnnnnnnnnnnnnnnnnnnnnnnnnnnnnnnnnnnnnnnnnnnnnnnnnnnnnnnnnnnnnnnnnnnnnnnnnnnnnnnnnnnnnnnnnnnnnnnnnnnnnnnnnnnnnnnnnnnnnnnnnnnnnnnnnnnnnnnnnnnnnnnnnnnnnnnnnnnnnnnnnnnnnnnnnnnnnnnnnnnnnnnnnnnnnnnnnnnnnnnnnnnnnnnnnnnnnnnnnnnnnnnnnnnnnnnnnnnnnnnnnnnnnnnnnnnnnnnnnnnnnnnnnnnnnnnnnnnnnnnnnnnnnnnnnnnnnnnnnnnnnnnnnnnnnnnnnnnnnnnnnnnnnnnnnnnnnnnnnnnnnnnnnnnnnnnnnnnnnnnnnnnnnnnnnnnnnnnnnnnnnnnnnnnnnnnnnnnnnnnnnnnnnnnnnnnnnnnnnnnnnnnnnnnnnnnnnnnnnnnnnnnnnnnnnnnnnnnnnnnnnnnnnnnnnnnnnnnnnnnnnnnnnnnnnnnnnnnnnnnnnnnnnnnnnnnnnnnnnnnnnnnnnnnnnnnnnnnnnnnnnnnnnnnnnnnnnnnnnnnnnnnnnnnnnnnnnnnnnnnnnnnnnnnnnnnnnnnnnnnnnnnnnnnnnnnnnnnnnnnnnnnnnnnnnnnnnnnnnnnnnnnnnnnnnnnnnnnnnnnnnnnnnnnnnnnnnnnnnnnnnnnnnnnnnnnnnnnnnnnnnnnnnnnnnnnnnnnnnnnnnnnnnnnnnnnnnnnnnnnnnnnnnnnnnnnnnnnnnnnnnnnnnnnnnnnnnnnnnnnnnnnnnnnnnnnnnnnnnnnnnnnnnnnnnnnnnnnnnnnnnnnnnnnnnnnnnnnnnnnnnnnnnnnnnnnnnnnnnnnnnnnnnnnnnnnnnnnnnnnnnnnnnnnnnnnnnnnnnnnnnnnnnnnnnnnnnnnnnnnnnnnnnnnnnnnnnnnnnnnnnnnnnnnnnnnnnnnnnnnnnnnnnnnnnnnnnnnnnnnnnnnnnnnnnnnnnnnnnnnnnnnnnnnnnnnnnnnnnnnnnnnnnnnnnnnnnnnnnnnnnnnnnnnnnnnnnnnnnnnnnnnnnnnnnnnnnnnnnnnnnnnnnnnnnnnnnnnnnnnnnnnnnnnnnnnnnnnnnnnnnnnnnnnnnnnnnnnnnnnnnnnnnnnnnnnnnnnnnnnnnnnnnnnnnnnnnnnnnnnnnnnnnnnnnnnnnnnnnnnnnnnnnnnnnnnnnnnnnnnnnnnnnnnnnnnnnnnnnnnnnnnnnnnnnnnnnnnnnnnnnnnnnnnnnnnnnnnnnnnnnnnnnnnnnnnnnnnnnnnnnnnnnnnnnnnnnnnnnnnnnnnnnnnnnnnnnnnnnnnnnnnnnnnnnnnnnnnnnnnnnnnnnnnnnnnnnnnnnnnnnnnnnnnnnnnnnnnnnnnnnnnnnnnnnnnnnnnnnnnnnnnnnnnnnnnnnnnnnnnnnnnnnnnnnnnnnnnnnnnnnnnnnnnnnnnnnnnnnnnnnnnnnnnnnnnnnnnnnnnnnnnnnnnnnnnnnnnnnnnnnnnnnnnnnnnnnnnnnnnnnnnnnnnnnnnnnnnnnnnnnnnnnnnnnnnnnnnnnnnnnnnnnnnnnnnnnnnnnnnnnnnnnnnnnnnnnnnnnnnnnnnnnnnnnnnnnnnnnnnnnnnnnnnnnnnnnnnnnnnnnnnnnnnnnnnnnnnnnnnnnnnnnnnnnnnnnnnnnnnnnnnnnnnnnnnnnnnnnnnnnnnnnnnnnnnnnnnnnnnnnnnnnnnnnnnnnnnnnnnnnnnnnnnnnnnnnnnnnnnnnnnnnnnnnnnnnnnnnnnnnnnnnnnnnnnnnnnnnnnnnnnnnnnnnnnnnnnnnnnnnnnnnnnnnnnnnnnnnnnnnnnnnnnnnnnnnnnnnnnnnnnnnnnnnnnnnnnnnnnnnnnnnnnnnnnnnnnnnnnnnnnnnnnnnnnnnnnnnnnnnnnnnnnnnnnnnnnnnnnnnnnnnnnnnnnnnnnnnnnnnnnnnnnnnnnnnnnnnnnnnnnnnnnnnnnnnnnnnnnnnnnnnnnnnnnnnnnnnnnnnnnnnnnnnnnnnnnnnnnnnnnnnnnnnnnnnnnnnnnnnnnnnnnnnnnnnnnnnnnnnnnnnnnnnnnnnnnnnnnnnnnnnnnnnnnnnnnnnnnnnnnnnnnnnnnnnnnnnnnnnnnnnnnnnnnnnnnnnnnnnnnnnnnnnnnnnnnnnnnnnnnnnnnnnnnnnnnnnnnnnnnnnnnnnnnnnnnnnnnnnnnnnnnnnnnnnnnnnnnnnnnnnnnnnnnnnnnnnnnnnnnnnnnnnnnnnnnnnnnnnnnnnnnnnnnnnnnnnnnnnnnnnnnnnnnnnnnnnnnnnnnnnnnnnnnnnnnnnnnnnnnnnnnnnnnnnnnnnnnnnnnnnnnnnnnnnnnnnnnnnnnnnnnnnnnnnnnnnnnnnnnnnnnnnnnnnnnnnnnnnnnnnnnnnnnnnnnnnnnnnnnnnnnnnnnnnnnnnnnnnnnnnnnnnnnnnnnnnnnnnnnnnnnnnnnnnnnnnnnnnnnnnnnnnnnnnnnnnnnnnnnnnnnnnnnnnnnnnnnnnnnnnnnnnnnnnnnnnnnnnnnnnnnnnnnnnnnnnnnnnnnnnnnnnnnnnnnnnnnnnnnnnnnnnnnnnnnnnnnnnnnnnnnnnnnnnnnnnnnnnnnnnnnnnnnnnnnnnnnnnnnnnnnnnnnnnnnnnnnnnnnnnnnnnnnnnnnnnnnnnnnnnnnnnnnnnnnnnnnnnnnnnnnnnnnnnnnnnnnnnnnnnnnnnnnnnnnnnnnnnnnnnnnnnnnnnnnnnnnnnnnnnnnnnnnnnnnnnnnnnnnnnnnnnnnnnnnnnnnnnnnnnnnnnnnnnnnnnnnnnnnnnnnnnnnnnnnnnnnnnnnnnnnnnnnnnnnnnnnnnnnnnnnnnnnnnnnnnnnnnnnnnnnnnnnnnnnnnnnnnnnnnnnnnnnnnnnnnnnnnnnnnnnnnnnnnnnnnnnnnnnnnnnnnnnnnnnnnnnnnnnnnnnnnnnnnnnnnnnnnnnnnnnnnnnnnnnnnnnnnnnnnnnnnnnnnnnnnnnnnnnnnnnnnnnnnnnnnnnnnnnnnnnnnnnnnnnnnnnnnnnnnnnnnnnnnnnnnnnnnnnnnnnnnnnnnnnnnnnnnnnnnnnnnnnnnnnnnnnnnnnnnnnnnnnnnnnnnnnnnnnnnnnnnnnnnnnnnnnnnnnnnnnnnnnnnnnnnnnnnnnnnnnnnnnnnnnnnnnnnnnnnnnnnnnnnnnnnnnnnnnnnnnnnnnnnnnnnnnnnnnnnnnnnnnnnnnnnnnnnnnnnnnnnnnnnnnnnnnnnnnnnnnnnnnnnnnnnnnnnnnnnnnnnnnnnnnnnnnnnnnnnnnnnnnnnnnnnnnnnnnnnnnnnnnnnnnnnnnnnnnnnnnnnnnnnnnnnnnnnnnnnnnnnnnnnnnnnnnnnnnnnnnnnnnnnnnnnnnnnnnnnnnnnnnnnnnnnnnnnnnnnnnnnnnnnnnnnnnnnnnnnnnnnnnnnnnnnnnnnnnnnnnnnnnnnnnnnnnnnnnnnnnnnnnnnnnnnnnnnnnnnnnnnnnnnnnnnnnnnnnnnnnnnnnnnnnnnnnnnnnnnnnnnnnnnnnnnnnnnnnnnnnnnnnnnnnnnnnnnnnnnnnnnnnnnnnnnnnnnnnnnnnnnnnnnnnnnnnnnnnnnnnnnnnnnnnnnnnnnnnnnnnnnnnnnnnnnnnnnnnnnnnnnnnnnnnnnnnnnnnnnnnnnnnnnnnnnnnnnnnnnnnnnnnnnnnnnnnnnnnnnnnnnnnnnnnnnnnnnnnnnnnnnnnnnnnnnnnnnnnnnnnnnnnnnnnnnnnnnnnnnnnnnnnnnnnnnnnnnnnnnnnnnnnnnnnnnnnnnnnnnnnnnnnnnnnnnnnnnnnnnnnnnnnnnnnnnnnnnnnnnnnnnnnnnnnnnnnnnnnnnnnnnnnnnnnnnnnnnnnnnnnnnnnnnnnnnnnnnnnnnnnnnnnnnnnnnnnnnnnnnnnnnnnnnnnnnnnnnnnnnnnnnnnnnnnnnnnnnnnnnnnnnnnnnnnnnnnnnnnnnnnnnnnnnnnnnnnnnnnnnnnnnnnnnnnnnnnnnnnnnnnnnnnnnnnnnnnnnnnnnnnnnnnnnnnnnnnnnnnnnnnnnnnnnnnnnnnnnnnnnnnnnnnnnnnnnnnnnnnnnnnnnnnnnnnnnnnnnnnnnnnnnnnnnnnnnnnnnnnnnnnnnnnnnnnnnnnnnnnnnnnnnnnnnnnnnnnnnnnnnnnnnnnnnnnnnnnnnnnnnnnnnnnnnnnnnnnnnnnnnnnnnnnnnnnnnnnnnnnnnnnnnnnnnnnnnnnnnnnnnnnnnnnnnnnnnnnnnnnnnnnnnnnnnnnnnnnnnnnnnnnnnnnnnnnnnnnnnnnnnnnnnnnnnnnnnnnnnnnnnnnnnnnnnnnnnnnnnnnnnnnnnnnnnnnnnnnnnnnnnnnnnnnnnnnnnnnnnnnnnnnnnnnnnnnnnnnnnnnnnnnnnnnnnnnnnnnnnnnnnnnnnnnnnnnnnnnnnnnnnnnnnnnnnnnnnnnnnnnnnnnnnnnnnnnnnnnnnnnnnnnnnnnnnnnnnnnnnnnnnnnnnnnnnnnnnnnnnnnnnnnnnnnnnnnnnnnnnnnnnnnnnnnnnnnnnnnnnnnnnnnnnnnnnnnnnnnnnnnnnnnnnnnnnnnnnnnnnnnnnnnnnnnnnnnnnnnnnnnnnnnnnnnnnnnnnnnnnnnnnnnnnnnnnnnnnnnnnnnnnnnnnnnnnnnnnnnnnnnnnnnnnnnnnnnnnnnnnnnnnnnnnnnnnnnnnnnnnnnnnnnnnnnnnnnnnnnnnnnnnnnnnnnnnnnnnnnnnnnnnnnnnnnnnnnnnnnnnnnnnnnnnnnnnnnnnnnnnnnnnnnnnnnnnnnnnnnnnnnnnnnnnnnnnnnnnnnnnnnnnnnnnnnnnnnnnnnnnnnnnnnnnnnnnnnnnnnnnnnnnnnnnnnnnnnnnnnnnnnnnnnnnnnnnnnnnnnnnnnnnnnnnnnnnnnnnnnnnnnnnnnnnnnnnnnnnnnnnnnnnnnnnnnnnnnnnnnnnnnnnnnnnnnnnnnnnnnnnnnnnnnnnnnnnnnnnnnnnnnnnnnnnnnnnnnnnnnnnnnnnnnnnnnnnnnnnnnnnnnnnnnnnnnnnnnnnnnnnnnnnnnnnnnnnnnnnnnnnnnnnnnnnnnnnnnnnnnnnnnnnnnnnnnnnnnnnnnnnnnnnnnnnnnnnnnnnnnnnnnnnnnnnnnnnnnnnnnnnnnnnnnnnnnnnnnnnnnnnnnnnnnnnnnnnnnnnnnnnnnnnnnnnnnnnnnnnnnnnnnnnnnnnnnnnnnnnnnnnnnnnnnnnnnnnnnnnnnnnnnnnnnnnnnnnnnnnnnnnnnnnnnnnnnnnnnnnnnnnnnnnnnnnnnnnnnnnnnnnnnnnnnnnnnnnnnnnnnnnnnnnnnnnnnnnnnnnnnnnnnnnnnnnnnnnnnnnnnnnnnnnnnnnnnnnnnnnnnnnnnnnnnnnnnnnnnnnnnnnnnnnnnnnnnnnnnnnnnnnnnnnnnnnnnnnnnnnnnnnnnnnnnnnnnnnnnnnnnnnnnnnnnnnnnnnnnnnnnnnnnnnnnnnnnnnnnnnnnnnnnnnnnnnnnnnnnnnnnnnnnnnnnnnnnnnnnnnnnnnnnnnnnnnnnnnnnnnnnnnnnnnnnnnnnnnnnnnnnnnnnnnnnnnnnnnnnnnnnnnnnnnnnnnnnnnnnnnnnnnnnnnnnnnnnnnnnnnnnnnnnnnnnnnnnnnnnnnnnnnnnnnnnnnnnnnnnnnnnnnnnnnnnnnnnnnnnnnnnnnnnnnnnnnnnnnnnnnnnnnnnnnnnnnnnnnnnnnnnnnnnnnnnnnnnnnnnnnnnnnnnnnnnnnnnnnnnnnnnnnnnnnnnnnnnnnnnnnnnnnnnnnnnnnnnnnnnnnnnnnnnnnnnnnnnnnnnnnnnnnnnnnnnnnnnnnnnnnnnnnnnnnnnnnnnnnnnnnnnnnnnnnnnnnnnnnnnnnnnnnnnnnnnnnnnnnnnnnnnnnnnnnnnnnnnnnnnnnnnnnnnnnnnnnnnnnnnnnnnnnnnnnnnnnnnnnnnnnnnnnnnnnnnnnnnnnnnnnnnnnnnnnnnnnnnnnnnnnnnnnnnnnnnnnnnnnnnnnnnnnnnnnnnnnnnnnnnnnnnnnnnnnnnnnnnnnnnnnnnnnnnnnnnnnnnnnnnnnnnnnnnnnnnnnnnnnnnnnnnnnnnnnnnnnnnnnnnnnnnnnnnnnnnnnnnnnnnnnnnnnnnnnnnnnnnnnnnnnnnnnnnnnnnnnnnnnnnnnnnnnnnnnnnnnnnnnnnnnnnnnnnnnnnnnnnnnnnnnnnnnnnnnnnnnnnnnnnnnnnnnnnnnnnnnnnnnnnnnnnnnnnnnnnnnnnnnnnnnnnnnnnnnnnnnnnnnnnnnnnnnnnnnnnnnnnnnnnnnnnnnnnnnnnnnnnnnnnnnnnnnnnnnnnnnnnnnnnnnnnnnnnnnnnnnnnnnnnnnnnnnnnnnnnnnnnnnnnnnnnnnnnnnnnnnnnnnnnnnnnnnnnnnnnnnnnnnnnnnnnnnnnnnnnnnnnnnnnnnnnnnnnnnnnnnnnnnnnnnnnnnnnnnnnnnnnnnnnnnnnnnnnnnnnnnnnnnnnnnnnnnnnnnnnnnnnnnnnnnnnnnnnnnnnnnnnnnnnnnnnnnnnnnnnnnnnnnnnnnnnnnnnnnnnnnnnnnnnnnnnnnnnnnnnnnnnnnnnnnnnnnnnnnnnnnnnnnnnnnnnnnnnnnnnnnnnnnnnnnnnnnnnnnnnnnnnnnnnnnnnnnnnnnnnnnnnnnnnnnnnnnnnnnnnnnnnnnnnnnnnnnnnnnnnnnnnnnnnnnnnnnnnnnnnnnnnnnnnnnnnnnnnnnnnnnnnnnnnnnnnnnnnnnnnnnnnnnnnnnnnnnnnnnnnnnnnnnnnnnnnnnnnnnnnnnnnnnnnnnnnnnnnnnnnnnnnnnnnnnnnnnnnnnnnnnnnnnnnnnnnnnnnnnnnnnnnnnnnnnnnnnnnnnnnnnnnnnnnnnnnnnnnnnnnnnnnnnnnnnnnnnnnnnnnnnnnnnnnnnnnnnnnnnnnnnnnnnnnnnnnnnnnnnnnnnnnnnnnnnnnnnnnnnnnnnnnnnnnnnnnnnnnnnnnnnnnnnnnnnnnnnnnnnnnnnnnnnnnnnnnnnnnnnnnnnnnnnnnnnnnnnnnnnnnnnnnnnnnnnnnnnnnnnnnnnnnnnnnnnnnnnnnnnnnnnnnnnnnnnnnnnnnnnnnnnnnnnnnnnnnnnnnnnnnnnnnnnnnnnnnnnnnnnnnnnnnnnnnnnnnnnnnnnnnnnnnnnnnnnnnnnnnnnnnnnnnnnnnnnnnnnnnnnnnnnnnnnnnnnnnnnnnnnnnnnnnnnnnnnnnnnnnnnnnnnnnnnnnnnnnnnnnnnnnnnnnnnnnnnnnnnnnnnnnnnnnnnnnnnnnnnnnnnnnnnnnnnnnnnnnnnnnnnnnnnnnnnnnnnnnnnnnnnnnnnnnnnnnnnnnnnnnnnnnnnnnnnnnnnnnnnnnnnnnnnnnnnnnnnnnnnnnnnnnnnnnnnnnnnnnnnnnnnnnnnnnnnnnnnnnnnnnnnnnnnnnnnnnnnnnnnnnnnnnnnnnnnnnnnnnnnnnnnnnnnnnnnnnnnnnnnnnnnnnnnnnnnnnnnnnnnnnnnnnnnnnnnnnnnnnnnnnnnnnnnnnnnnnnnnnnnnnnnnnnnnnnnnnnnnnnnnnnnnnnnnnnnnnnnnnnnnnnnnnnnnnnnnnnnnnnnnnnnnnnnnnnnnnnnnnnnnnnnnnnnnnnnnnnnnnnnnnnnnnnnnnnnnnnnnnnnnnnnnnnnnnnnnnnnnnnnnnnnnnnnnnnnnnnnnnnnnnnnnnnnnnnnnnnnnnnnnnnnnnnnnnnnnnnnnnnnnnnnnnnnnnnnnnnnnnnnnnnnnnnnnnnnnnnnnnnnnnnnnnnnnnnnnnnnnnnnnnnnnnnnnnnnnnnnnnnnnnnnnnnnnnnnnnnnnnnnnnnnnnnnnnnnnnnnnnnnnnnnnnnnnnnnnnnnnnnnnnnnnnnnnnnnnnnnnnnnnnnnnnnnnnnnnnnnnnnnnnnnnnnnnnnnnnnnnnnnnnnnnnnnnnnnnnnnnnnnnnnnnnnnnnnnnnnnnnnnnnnnnnnnnnnnnnnnnnnnnnnnnnnnnnnnnnnnnnnnnnnnnnnnnnnnnnnnnnnnnnnnnnnnnnnnnnnnnnnnnnnnnnnnnnnnnnnnnnnnnnnnnnnnnnnnnnnnnnnnnnnnnnnnnnnnnnnnnnnnnnnnnnnnnnnnnnnnnnnnnnnnnnnnnnnnnnnnnnnnnnnnnnnnnnnnnnnnnnnnnnnnnnnnnnnnnnnnnnnnnnnnnnnnnnnnnnnnnnnnnnnnnnnnnnnnnnnnnnnnnnnnnnnnnnnnnnnnnnnnnnnnnnnnnnnnnnnnnnnnnnnnnnnnnnnnnnnnnnnnnnnnnnnnnnnnnnnnnnnnnnnnnnnnnnnnnnnnnnnnnnnnnnnnnnnnnnnnnnnnnnnnnnnnnnnnnnnnnnnnnnnnnnnnnnnnnnnnnnnnnnnnnnnnnnnnnnnnnnnnnnnnnnnnnnnnnnnnnnnnnnnnnnnnnnnnnnnnnnnnnnnnnnnnnnnnnnnnnnnnnnnnnnnnnnnnnnnnnnnnnnnnnnnnnnnnnnnnnnnnnnnnnnnnnnnnnnnnnnnnnnnnnnnnnnnnnnnnnnnnnnnnnnnnnnnnnnnnnnnnnnnnnnnnnnnnnnnnnnnnnnnnnnnnnnnnnnnnnnnnnnnnnnnnnnnnnnnnnnnnnnnnnnnnnnnnnnnnnnnnnnnnnnnnnnnnnnnnnnnnnnnnnnnnnnnnnnnnnnnnnnnnnnnnnnnnnnnnnnnnnnnnnnnnnnnnnnnnnnnnnnnnnnnnnnnnnnnnnnnnnnnnnnnnnnnnnnnnnnnnnnnnnnnnnnnnnnnnnnnnnnnnnnnnnnnnnnnnnnnnnnnnnnnnnnnnnnnnnnnnnnnnnnnnnnnnnnnnnnnnnnnnnnnnnnnnnnnnnnnnnnnnnnnnnnnnnnnnnnnnnnnnnnnnnnnnnnnnnnnnnnnnnnnnnnnnnnnnnnnnnnnnnnnnnnnnnnnnnnnnnnnnnnnnnnnnnnnnnnnnnnnnnnnnnnnnnnnnnnnnnnnnnnnnnnnnnnnnnnnnnnnnnnnnnnnnnnnnnnnnnnnnnnnnnnnnnnnnnnnnnnnnnnnnnnnnnnnnnnnnnnnnnnnnnnnnnnnnnnnnnnnnnnnnnnnnnnnnnnnnnnnnnnnnnnnnnnnnnnnnnnnnnnnnnnnnnnnnnnnnnnnnnnnnnnnnnnnnnnnnnnnnnnnnnnnnnnnnnnnnnnnnnnnnnnnnnnnnnnnnnnnnnnnnnnnnnnnnnnnnnnnnnnnnnnnnnnnnnnnnnnnnnnnnnnnnnnnnnnnnnnnnnnnnnnnnnnnnnnnnnnnnnnnnnnnnnnnnnnnnnnnnnnnnnnnnnnnnnnnnnnnnnnnnnnnnnnnnnnnnnnnnnnnnnnnnnnnnnnnnnnnnnnnnnnnnnnnnnnnnnnnnnnnnnnnnnnnnnnnnnnnnnnnnnnnnnnnnnnnnnnnnnnnnnnnnnnnnnnnnnnnnnnnnnnnnnnnnnnnnnnnnnnnnnnnnnnnnnnnnnnnnnnnnnnnnnnnnnnnnnnnnnnnnnnnnnnnnnnnnnnnnnnnnnnnnnnnnnnnnnnnnnnnnnnnnnnnnnnnnnnnnnnnnnnnnnnnnnnnnnnnnnnnnnnnnnnnnnnnnnnnnnnnnnnnnnnnnnnnnnnnnnnnnnnnnnnnnnnnnnnnnnnnnnnnnnnnnnnnnnnnnnnnnnnnnnnnnnnnnnnnnnnnnnnnnnnnnnnnnnnnnnnnnnnnnnnnnnnnnnnnnnnnnnnnnnnnnnnnnnnnnnnnnnnnnnnnnnnnnnnnnnnnnnnnnnnnnnnnnnnnnnnnnnnnnnnnnnnnnnnnnnnnnnnnnnnnnnnnnnnnnnnnnnnnnnnnnnnnnnnnnnnnnnnnnnnnnnnnnnnnnnnnnnnnnnnnnnnnnnnnnnnnnnnnnnnnnnnnnnnnnnnnnnnnnnnnnnnnnnnnnnnnnnnnnnnnnnnnnnnnnnnnnnnnnnnnnnnnnnnnnnnnnnnnnnnnnnnnnnnnnnnnnnnnnnnnnnnnnnnnnnnnnnnnnnnnnnnnnnnnnnnnnnnnnnnnnnnnnnnnnnnnnnnnnnnnnnnnnnnnnnnnnnnnnnnnnnnnnnnnnnnnnnnnnnnnnnnnnnnnnnnnnnnnnnnnnnnnnnnnnnnnnnnnnnnnnnnnnnnnnnnnnnnnnnnnnnnnnnnnnnnnnnnnnnnnnnnnnnnnnnnnnnnnnnnnnnnnnnnnnnnnnnnnnnnnnnnnnnnnnnnnnnnnnnnnnnnnnnnnnnnnnnnnnnnnnnnnnnnnnnnnnnnnnnnnnnnnnnnnnnnnnnnnnnnnnnnnnnnnnnnnnnnnnnnnnnnnnnnnnnnnnnnnnnnnnnnnnnnnnnnnnnnnnnnnnnnnnnnnnnnnnnnnnnnnnnnnnnnnnnnnnnnnnnnnnnnnnnnnnnnnnnnnnnnnnnnnnnnnnnnnnnnnnnnnnnnnnnnnnnnnnnnnnnnnnnnnnnnnnnnnnnnnnnnnnnnnnnnnnnnnnnnnnnnnnnnnnnnnnnnnnnnnnnnnnnnnnnnnnnnnnnnnnnnnnnnnnnnnnnnnnnnnnnnnnnnnnnnnnnnnnnnnnnnnnnnnnnnnnnnnnnnnnnnnnnnnnnnnnnnnnnnnnnnnnnnnnnnnnnnnnnnnnnnnnnnnnnnnnnnnnnnnnnnnnnnnnnnnnnnnnnnnnnnnnnnnnnnnnnnnnnnnnnnnnnnnnnnnnnnnnnnnnnnnnnnnnnnnnnnnnnnnnnnnnnnnnnnnnnnnnnnnnnnnnnnnnnnnnnnnnnnnnnnnnnnnnnnnnnnnnnnnnnnnnnnnnnnnnnnnnnnnnnnnnnnnnnnnnnnnnnnnnnnnnnnnnnnnnnnnnnnnnnnnnnnnnnnnnnnnnnnnnnnnnnnnnnnnnnnnnnnnnnnnnnnnnnnnnnnnnnnnnnnnnnnnnnnnnnnnnnnnnnnnnnnnnnnnnnnnnnnnnnnnnnnnnnnnnnnnnnnnnnnnnnnnnnnnnnnnnnnnnnnnnnnnnnnnnnnnnnnnnnnnnnnnnnnnnnnnnnnnnnnnnnnnnnnnnnnnnnnnnnnnnnnnnnnnnnnnnnnnnnnnnnnnnnnnnnnnnnnnnnnnnnnnnnnnnnnnnnnnnnnnnnnnnnnnnnnnnnnnnnnnnnnnnnnnnnnnnnnnnnnnnnnnnnnnnnnnnnnnnnnnnnnnnnnnnnnnnnnnnnnnnnnnnnnnnnnnnnnnnnnnnnnnnnnnnnnnnnnnnnnnnnnnnnnnnnnnnnnnnnnnnnnnnnnnnnnnnnnnnnnnnnnnnnnnnnnnnnnnnnnnnnnnnnnnnnnnnnnnnnnnnnnnnnnnnnnnnnnnnnnnnnnnnnnnnnnnnnnnnnnnnnnnnnnnnnnnnnnnnnnnnnnnnnnnnnnnnnnnnnnnnnnnnnnnnnnnnnnnnnnnnnnnnnnnnnnnnnnnnnnnnnnnnnnnnnnnnnnnnnnnnnnnnnnnnnnnnnnnnnnnnnnnnnnnnnnnnnnnnnnnnnnnnnnnnnnnnnnnnnnnnnnnnnnnnnnnnnnnnnnnnnnnnnnnnnnnnnnnnnnnnnnnnnnnnnnnnnnnnnnnnnnnnnnnnnnnnnnnnnnnnnnnnnnnnnnnnnnnnnnnnnnnnnnnnnnnnnnnnnnnnnnnnnnnnnnnnnnnnnnnnnnnnnnnnnnnnnnnnnnnnnnnnnnnnnnnnnnnnnnnnnnnnnnnnnnnnnnnnnnnnnnnnnnnnnnnnnnnnnnnnnnnnnnnnnnnnnnnnnnnnnnnnnnnnnnnnnnnnnnnnnnnnnnnnnnnnnnnnnnnnnnnnnnnnnnnnnnnnnnnnnnnnnnnnnnnnnnnnnnnnnnnnnnnnnnnnnnnnnnnnnnnnnnnnnnnnnnnnnnnnnnnnnnnnnnnnnnnnnnnnnnnnnnnnnnnnnnnnnnnnnnnnnnnnnnnnnnnnnnnnnnnnnnnnnnnnnnnnnnnnnnnnnnnnnnnnnnnnnnnnnnnnnnnnnnnnnnnnnnnnnnnnnnnnnnnnnnnnnnnnnnnnnnnnnnnnnnnnnnnnnnnnnnnnnnnnnnnnnnnnnnnnnnnnnnnnnnnnnnnnnnnnnnnnnnnnnnnnnnnnnnnnnnnnnnnnnnnnnnnnnnnnnnnnnnnnnnnnnnnnnnnnnnnnnnnnnnnnnnnnnnnnnnnnnnnnnnnnnnnnnnnnnnnnnnnnnnnnnnnnnnnnnnnnnnnnnnnnnnnnnnnnnnnnnnnnnnnnnnnnnnnnnnnnnnnnnnnnnnnnnnnnnnnnnnnnnnnnnnnnnnnnnnnnnnnnnnnnnnnnnnnnnnnnnnnnnnnnnnnnnnnnnnnnnnnnnnnnnnnnnnnnnnnnnnnnnnnnnnnnnnnnnnnnnnnnnnnnnnnnnnnnnnnnnnnnnnnnnnnnnnnnnnnnnnnnnnnnnnnnnnnnnnnnnnnnnnnnnnnnnnnnnnnnnnnnnnnnnnnnnnnnnnnnnnnnnnnnnnnnnnnnnnnnnnnnnnnnnnnnnnnnnnnnnnnnnnnnnnnnnnnnnnnnnnnnnnnnnnnnnnnnnnnnnnnnnnnnnnnnnnnnnnnnnnnnnnnnnnnnnnnnnnnnnnnnnnnnnnnnnnnnnnnnnnnnnnnnnnnnnnnnnnnnnnnnnnnnnnnnnnnnnnnnnnnnnnnnnnnnnnnnnnnnnnnnnnnnnnnnnnnnnnnnnnnnnnnnnnnnnnnnnnnnnnnnnnnnnnnnnnnnnnnnnnnnnnnnnnnnnnnnnnnnnnnnnnnnnnnnnnnnnnnnnnnnnnnnnnnnnnnnnnnnnnnnnnnnnnnnnnnnnnnnnnnnnnnnnnnnnnnnnnnnnnnnnnnnnnnnnnnnnnnnnnnnnnnnnnnnnnnnnnnnnnnnnnnnnnnnnnnnnnnnnnnnnnnnnnnnnnnnnnnnnnnnnnnnnnnnnnnnnnnnnnnnnnnnnnnnnnnnnnnnnnnnnnnnnnnnnnnnnnnnnnnnnnnnnnnnnnnnnnnnnnnnnnnnnnnnnnnnnnnnnnnnnnnnnnnnnnnnnnnnnnnnnnnnnnnnnnnnnnnnnnnnnnnnnnnnnnnnnnnnnnnnnnnnnnnnnnnnnnnnnnnnnnnnnnnnnnnnnnnnnnnnnnnnnnnnnnnnnnnnnnnnnnnnnnnnnnnnnnnnnnnnnnnnnnnnnnnnnnnnnnnnnnnnnnnnnnnnnnnnnnnnnnnnnnnnnnnnnnnnnnnnnnnnnnnnnnnnnnnnnnnnnnnnnnnnnnnnnnnnnnnnnnnnnnnnnnnnnnnnnnnnnnnnnnnnnnnnnnnnnnnnnnnnnnnnnnnnnnnnnnnnnnnnnnnnnnnnnnnnnnnnnnnnnnnnnnnnnnnnnnnnnnnnnnnnnnnnnnnnnnnnnnnnnnnnnnnnnnnnnnnnnnnnnnnnnnnnnnnnnnnnnnnnnnnnnnnnnnnnnnnnnnnnnnnnnnnnnnnnnnnnnnnnnnnnnnnnnnnnnnnnnnnnnnnnnnnnnnnnnnnnnnnnnnnnnnnnnnnnnnnnnnnnnnnnnnnnnnnnnnnnnnnnnnnnnnnnnnnnnnnnnnnnnnnnnnnnnnnnnnnnnnnnnnnnnnnnnnnnnnnnnnnnnnnnnnnnnnnnnnnnnnnnnnnnnnnnnnnnnnnnnnnnnnnnnnnnnnnnnnnnnnnnnnnnnnnnnnnnnnnnnnnnnnnnnnnnnnnnnnnnnnnnnnnnnnnnnnnnnnnnnnnnnnnnnnnnnnnnnnnnnnnnnnnnnnnnnnnnnnnnnnnnnnnnnnnnnnnnnnnnnnnnnnnnnnnnnnnnnnnnnnnnnnnnnnnnnnnnnnnnnnnnnnnnnnnnnnnnnnnnnnnnnnnnnnnnnnnnnnnnnnnnnnnnnnnnnnnnnnnnnnnnnnnnnnnnnnnnnnnnnnnnnnnnnnnnnnnnnnnnnnnnnnnnnnnnnnnnnnnnnnnnnnnnnnnnnnnnnnnnnnnnnnnnnnnnnnnnnnnnnnnnnnnnnnnnnnnnnnnnnnnnnnnnnnnnnnnnnnnnnnnnnnnnnnnnnnnnnnnnnnnnnnnnnnnnnnnnnnnnnnnnnnnnnnnnnnnnnnnnnnnnnnnnnnnnnnnnnnnnnnnnnnnnnnnnnnnnnnnnnnnnnnnnnnnnnnnnnnnnnnnnnnnnnnnnnnnnnnnnnnnnnnnnnnnnnnnnnnnnnnnnnnnnnnnnnnnnnnnnnnnnnnnnnnnnnnnnnnnnnnnnnnnnnnnnnnnnnnnnnnnnnnnnnnnnnnnnnnnnnnnnnnnnnnnnnnnnnnnnnnnnnnnnnnnnnnnnnnnnnnnnnnnnnnnnnnnnnnnnnnnnnnnnnnnnnnnnnnnnnnnnnnnnnnnnnnnnnnnnnnnnnnnnnnnnnnnnnnnnnnnnnnnnnnnnnnnnnnnnnnnnnnnnnnnnnnnnnnnnnnnnnnnnnnnnnnnnnnnnnnnnnnnnnnnnnnnnnnnnnnnnnnnnnnnnnnnnnnnnnnnnnnnnnnnnnnnnnnnnnnnnnnnnnnnnnnnnnnnnnnnnnnnnnnnnnnnnnnnnnnnnnnnnnnnnnnnnnnnnnnnnnnnnnnnnnnnnnnnnnnnnnnnnnnnnnnnnnnnnnnnnnnnnnnnnnnnnnnnnnnnnnnnnnnnnnnnnnnnnnnnnnnnnnnnnnnnnnnnnnnnnnnnnnnnnnnnnnnnnnnnnnnnnnnnnnnnnnnnnnnnnnnnnnnnnnnnnnnnnnnnnnnnnnnnnnnnnnnnnnnnnnnnnnnnnnnnnnnnnnnnnnnnnnnnnnnnnnnnnnnnnnnnnnnnnnnnnnnnnnnnnnnnnnnnnnnnnnnnnnnnnnnnnnnnnnnnnnnnnnnnnnnnnnnnnnnnnnnnnnnnnnnnnnnnnnnnnnnnnnnnnnnnnnnnnnnnnnnnnnnnnnnnnnnnnnnnnnnnnnnnnnnnnnnnnnnnnnnnnnnnnnnnnnnnnnnnnnnnnnnnnnnnnnnnnnnnnnnnnnnnnnnnnnnnnnnnnnnnnnnnnnnnnnnnnnnnnnnnnnnnnnnnnnnnnnnnnnnnnnnnnnnnnnnnnnnnnnnnnnnnnnnnnnnnnnnnnnnnnnnnnnnnnnnnnnnnnnnnnnnnnnnnnnnnnnnnnnnnnnnnnnnnnnnnnnnnnnnnnnnnnnnnnnnnnnnnnnnnnnnnnnnnnnnnnnnnnnnnnnnnnnnnnnnnnnnnnnnnnnnnnnnnnnnnnnnnnnnnnnnnnnnnnnnnnnnnnnnnnnnnnnnnnnnnnnnnnnnnnnnnnnnnnnnnnnnnnnnnnnnnnnnnnnnnnnnnnnnnnnnnnnnnnnnnnnnnnnnnnnnnnnnnnnnnnnnnnnnnnnnnnnnnnnnnnnnnnnnnnnnnnnnnnnnnnnnnnnnnnnnnnnnnnnnnnnnnnnnnnnnnnnnnnnnnnnnnnnnnnnnnnnnnnnnnnnnnnnnnnnnnnnnnnnnnnnnnnnnnnnnnnnnnnnnnnnnnnnnnnnnnnnnnnnnnnnnnnnnnnnnnnnnnnnnnnnnnnnnnnnnnnnnnnnnnnnnnnnnnnnnnnnnnnnnnnnnnnnnnnnnnnnnnnnnnnnnnnnnnnnnnnnnnnnnnnnnnnnnnnnnnnnnnnnnnnnnnnnnnnnnnnnnnnnnnnnnnnnnnnnnnnnnnnnnnnnnnnnnnnnnnnnnnnnnnnnnnnnnnnnnnnnnnnnnnnnnnnnnnnnnnnnnnnnnnnnnnnnnnnnnnnnnnnnnnnnnnnnnnnnnnnnnnnnnnnnnnnnnnnnnnnnnnnnnnnnnnnnnnnnnnnnnnnnnnnnnnnnnnnnnnnnnnnnnnnnnnnnnnnnnnnnnnnnnnnnnnnnnnnnnnnnnnnnnnnnnnnnnnnnnnnnnnnnnnnnnnnnnnnnnnnnnnnnnnnnnnnnnnnnnnnnnnnnnnnnnnnnnnnnnnnnnnnnnnnnnnnnnnnnnnnnnnnnnnnnnnnnnnnnnnnnnnnnnnnnnnnnnnnnnnnnnnnnnnnnnnnnnnnnnnnnnnnnnnnnnnnnnnnnnnnnnnnnnnnnnnnnnnnnnnnnnnnnnnnnnnnnnnnnnnnnnnnnnnnnnnnnnnnnnnnnnnnnnnnnnnnnnnnnnnnnnnnnnnnnnnnnnnnnnnnnnnnnnnnnnnnnnnnnnnnnnnnnnnnnnnnnnnnnnnnnnnnnnnnnnnnnnnnnnnnnnnnnnnnnnnnnnnnnnnnnnnnnnnnnnnnnnnnnnnnnnnnnnnnnnnnnnnnnnnnnnnnnnnnnnnnnnnnnnnnnnnnnnnnnnnnnnnnnnnnnnnnnnnnnnnnnnnnnnnnnnnnnnnnnnnnnnnnnnnnnnnnnnnnnnnnnnnnnnnnnnnnnnnnnnnnnnnnnnnnnnnnnnnnnnnnnnnnnnnnnnnnnnnnnnnnnnnnnnnnnnnnnnnnnnnnnnnnnnnnnnnnnnnnnnnnnnnnnnnnnnnnnnnnnnnnnnnnnnnnnnnnnnnnnnnnnnnnnnnnnnnnnnnnnnnnnnnnnnnnnnnnnnnnnnnnnnnnnnnnnnnnnnnnnnnnnnnnnnnnnnnnnnnnnnnnnnnnnnnnnnnnnnnnnnnnnnnnnnnnnnnnnnnnnnnnnnnnnnnnnnnnnnnnnnnnnnnnnnnnnnnnnnnnnnnnnnnnnnnnnnnnnnnnnnnnnnnnnnnnnnnnnnnnnnnnnnnnnnnnnnnnnnnnnnnnnnnnnnnnnnnnnnnnnnnnnnnnnnnnnnnnnnnnnnnnnnnnnnnnnnnnnnnnnnnnnnnnnnnnnnnnnnnnnnnnnnnnnnnnnnnnnnnnnnnnnnnnnnnnnnnnnnnnnnnnnnnnnnnnnnnnnnnnnnnnnnnnnnnnnnnnnnnnnnnnnnnnnnnnnnnnnnnnnnnnnnnnnnnnnnnnnnnnnnnnnnnnnnnnnnnnnnnnnnnnnnnnnnnnnnnnnnnnnnnnnnnnnnnnnnnnnnnnnnnnnnnnnnnnnnnnnnnnnnnnnnnnnnnnnnnnnnnnnnnnnnnnnnnnnnnnnnnnnnnnnnnnnnnnnnnnnnnnnnnnnnnnnnnnnnnnnnnnnnnnnnnnnnnnnnnnnnnnnnnnnnnnnnnnnnnnnnnnnnnnnnnnnnnnnnnnnnnnnnnnnnnnnnnnnnnnnnnnnnnnnnnnnnnnnnnnnnnnnnnnnnnnnnnnnnnnnnnnnnnnnnnnnnnnnnnnnnnnnnnnnnnnnnnnnnnnnnnnnnnnnnnnnnnnnnnnnnnnnnnnnnnnnnnnnnnnnnnnnnnnnnnnnnnnnnnnnnnnnnnnnnnnnnnnnnnnnnnnnnnnnnnnnnnnnnnnnnnnnnnnnnnnnnnnnnnnnnnnnnnnnnnnnnnnnnnnnnnnnnnnnnnnnnnnnnnnnnnnnnnnnnnnnnnnnnnnnnnnnnnnnnnnnnnnnnnnnnnnnnnnnnnnnnnnnnnnnnnnnnnnnnnnnnnnnnnnnnnnnnnnnnnnnnnnnnnnnnnnnnnnnnnnnnnnnnnnnnnnnnnnnnnnnnnnnnnnnnnnnnnnnnnnnnnnnnnnnnnnnnnnnnnnnnnnnnnnnnnnnnnnnnnnnnnnnnnnnnnnnnnnnnnnnnnnnnnnnnnnnnnnnnnnnnnnnnnnnnnnnnnnnnnnnnnnnnnnnnnnnnnnnnnnnnnnnnnnnnnnnnnnnnnnnnnnnnnnnnnnnnnnnnnnnnnnnnnnnnnnnnnnnnnnnnnnnnnnnnnnnnnnnnnnnnnnnnnnnnnnnnnnnnnnnnnnnnnnnnnnnnnnnnnnnnnnnnnnnnnnnnnnnnnnnnnnnnnnnnnnnnnnnnnnnnnnnnnnnnnnnnnnnnnnnnnnnnnnnnnnnnnnnnnnnnnnnnnnnnnnnnnnnnnnnnnnnnnnnnnnnnnnnnnnnnnnnnnnnnnnnnnnnnnnnnnnnnnnnnnnnnnnnnnnnnnnnnnnnnnnnnnnnnnnnnnnnnnnnnnnnnnnnnnnnnnnnnnnnnnnnnnnnnnnnnnnnnnnnnnnnnnnnnnnnnnnnnnnnnnnnnnnnnnnnnnnnnnnnnnnnnnnnnnnnnnnnnnnnnnnnnnnnnnnnnnnnnnnnnnnnnnnnnnnnnnnnnnnnnnnnnnnnnnnnnnnnnnnnnnnnnnnnnnnnnnnnnnnnnnnnnnnnnnnnnnnnnnnnnnnnnnnnnnnnnnnnnnnnnnnnnnnnnnnnnnnnnnnnnnnnnnnnnnnnnnnnnnnnnnnnnnnnnnnnnnnnnnnnnnnnnnnnnnnnnnnnnnnnnnnnnnnnnnnnnnnnnnnnnnnnnnnnnnnnnnnnnnnnnnnnnnnnnnnnnnnnnnnnnnnnnnnnnnnnnnnnnnnnnnnnnnnnnnnnnnnnnnnnnnnnnnnnnnnnnnnnnnnnnnnnnnnnnnnnnnnnnnnnnnnnnnnnnnnnnnnnnnnnnnnnnnnnnnnnnnnnnnnnnnnnnnnnnnnnnnnnnnnnnnnnnnnnnnnnnnnnnnnnnnnnnnnnnnnnnnnnnnnnnnnnnnnnnnnnnnnnnnnnnnnnnnnnnnnnnnnnnnnnnnnnnnnnnnnnnnnnnnnnnnnnnnnnnnnnnnnnnnnnnnnnnnnnnnnnnnnnnnnnnnnnnnnnnnnnnnnnnnnnnnnnnnnnnnnnnnnnnnnnnnnnnnnnnnnnnnnnnnnnnnnnnnnnnnnnnnnnnnnnnnnnnnnnnnnnnnnnnnnnnnnnnnnnnnnnnnnnnnnnnnnnnnnnnnnnnnnnnnnnnnnnnnnnnnnnnnnnnnnnnnnnnnnnnnnnnnnnnnnnnnnnnnnnnnnnnnnnnnnnnnnnnnnnnnnnnnnnnnnnnnnnnnnnnnnnnnnnnnnnnnnnnnnnnnnnnnnnnnnnnnnnnnnnnnnnnnnnnnnnnnnnnnnnnnnnnnnnnnnnnnnnnnnnnnnnnnnnnnnnnnnnnnnnnnnnnnnnnnnnnnnnnnnnnnnnnnnnnnnnnnnnnnnnnnnnnnnnnnnnnnnnnnnnnnnnnnnnnnnnnnnnnnnnnnnnnnnnnnnnnnnnnnnnnnnnnnnnnnnnnnnnnnnnnnnnnnnnnnnnnnnnnnnnnnnnnnnnnnnnnnnnnnnnnnnnnnnnnnnnnnnnnnnnnnnnnnnnnnnnnnnnnnnnnnnnnnnnnnnnnnnnnnnnnnnnnnnnnnnnnnnnnnnnnnnnnnnnnnnnnnnnnnnnnnnnnnnnnnnnnnnnnnnnnnnnnnnnnnnnnnnnnnnnnnnnnnnnnnnnnnnnnnnnnnnnnnnnnnnnnnnnnnnnnnnnnnnnnnnnnnnnnnnnnnnnnnnnnnnnnnnnnnnnnnnnnnnnnnnnnnnnnnnnnnnnnnnnnnnnnnnnnnnnnnnnnnnnnnnnnnnnnnnnnnnnnnnnnnnnnnnnnnnnnnnnnnnnnnnnnnnnnnnnnnnnnnnnnnnnnnnnnnnnnnnnnnnnnnnnnnnnnnnnnnnnnnnnnnnnnnnnnnnnnnnnnnnnnnnnnnnnnnnnnnnnnnnnnnnnnnnnnnnnnnnnnnnnnnnnnnnnnnnnnnnnnnnnnnnnnnnnnnnnnnnnnnnnnnnnnnnnnnnnnnnnnnnnnnnnnnnnnnnnnnnnnnnnnnnnnnnnnnnnnnnnnnnnnnnnnnnnnnnnnnnnnnnnnnnnnnnnnnnnnnnnnnnnnnnnnnnnnnnnnnnnnnnnnnnnnnnnnnnnnnnnnnnnnnnnnnnnnnnnnnnnnnnnnnnnnnnnnnnnnnnnnnnnnnnnnnnnnnnnnnnnnnnnnnnnnnnnnnnnnnnnnnnnnnnnnnnnnnnnnnnnnnnnnnnnnnnnnnnnnnnnnnnnnnnnnnnnnnnnnnnnnnnnnnnnnnnnnnnnnnnnnnnnnnnnnnnnnnnnnnnnnnnnnnnnnnnnnnnnnnnnnnnnnnnnnnnnnnnnnnnnnnnnnnnnnnnnnnnnnnnnnnnnnnnnnnnnnnnnnnnnnnnnnnnnnnnnnnnnnnnnnnnnnnnnnnnnnnnnnnnnnnnnnnnnnnnnnnnnnnnnnnnnnnnnnnnnnnnnnnnnnnnnnnnnnnnnnnnnnnnnnnnnnnnnnnnnnnnnnnnnnnnnnnnnnnnnnnnnnnnnnnnnnnnnnnnnnnnnnnnnnnnnnnnnnnnnnnnnnnnnnnnnnnnnnnnnnnnnnnnnnnnnnnnnnnnnnnnnnnnnnnnnnnnnnnnnnnnnnnnnnnnnnnnnnnnnnnnnnnnnnnnnnnnnnnnnnnnnnnnnnnnnnnnnnnnnnnnnnnnnnnnnnnnnnnnnnnnnnnnnnnnnnnnnnnnnnnnnnnnnnnnnnnnnnnnnnnnnnnnnnnnnnnnnnnnnnnnnnnnnnnnnnnnnnnnnnnnnnnnnnnnnnnnnnnnnnnnnnnnnnnnnnnnnnnnnnnnnnnnnnnnnnnnnnnnnnnnnnnnnnnnnnnnnnnnnnnnnnnnnnnnnnnnnnnnnnnnnnnnnnnnnnnnnnnnnnnnnnnnnnnnnnnnnnnnnnnnnnnnnnnnnnnnnnnnnnnnnnnnnnnnnnnnnnnnnnnnnnnnnnnnnnnnnnnnnnnnnnnnnnnnnnnnnnnnnnnnnnnnnnnnnnnnnnnnnnnnnnnnnnnnnnnnnnnnnnnnnnnnnnnnnnnnnnnnnnnnnnnnnnnnnnnnnnnnnnnnnnnnnnnnnnnnnnnnnnnnnnnnnnnnnnnnnnnnnnnnnnnnnnnnnnnnnnnnnnnnnnnnnnnnnnnnnnnnnnnnnnnnnnnnnnnnnnnnnnnnnnnnnnnnnnnnnnnnnnnnnnnnnnnnnnnnnnnnnnnnnnnnnnnnnnnnnnnnnnnnnnnnnnnnnnnnnnnnnnnnnnnnnnnnnnnnnnnnnnnnnnnnnnnnnnnnnnnnnnnnnnnnnnnnnnnnnnnnnnnnnnnnnnnnnnnnnnnnnnnnnnnnnnnnnnnnnnnnnnnnnnnnnnnnnnnnnnnnnnnnnnnnnnnnnnnnnnnnnnnnnnnnnnnnnnnnnnnnnnnnnnnnnnnnnnnnnnnnnnnnnnnnnnnnnnnnnnnnnnnnnnnnnnnnnnnnnnnnnnnnnnnnnnnnnnnnnnnnnnnnnnnnnnnnnnnnnnnnnnnnnnnnnnnnnnnnnnnnnnnnnnnnnnnnnnnnnnnnnnnnnnnnnnnnnnnnnnnnnnnnnnnnnnnnnnnnnnnnnnnnnnnnnnnnnnnnnnnnnnnnnnnnnnnnnnnnnnnnnnnnnnnnnnnnnnnnnnnnnnnnnnnnnnnnnnnnnnnnnnnnnnnnnnnnnnnnnnnnnnnnnnnnnnnnnnnnnnnnnnnnnnnnnnnnnnnnnnnnnnnnnnnnnnnnnnnnnnnnnnnnnnnnnnnnnnnnnnnnnnnnnnnnnnnnnnnnnnnnnnnnnnnnnnnnnnnnnnnnnnnnnnnnnnnnnnnnnnnnnnnnnnnnnnnnnnnnnnnnnnnnnnnnnnnnnnnnnnnnnnnnnnnnnnnnnnnnnnnnnnnnnnnnnnnnnnnnnnnnnnnnnnnnnnnnnnnnnnnnnnnnnnnnnnnnnnnnnnnnnnnnnnnnnnnnnnnnnnnnnnnnnnnnnnnnnnnnnnnnnnnnnnnnnnnnnnnnnnnnnnnnnnnnnnnnnnnnnnnnnnnnnnnnnnnnnnnnnnnnnnnnnnnnnnnnnnnnnnnnnnnnnnnnnnnnnnnnnnnnnnnnnnnnnnnnnnnnnnnnnnnnnnnnnnnnnnnnnnnnnnnnnnnnnnnnnnnnnnnnnnnnnnnnnnnnnnnnnnnnnnnnnnnnnnnnnnnnnnnnnnnnnnnnnnnnnnnnnnnnnnnnnnnnnnnnnnnnnnnnnnnnnnnnnnnnnnnnnnnnnnnnnnnnnnnnnnnnnnnnnnnnnnnnnnnnnnnnnnnnnnnnnnnnnnnnnnnnnnnnnnnnnnnnnnnnnnnnnnnnnnnnnnnnnnnnnnnnnnnnnnnnnnnnnnnnnnnnnnnnnnnnnnnnnnnnnnnnnnnnnnnnnnnnnnnnnnnnnnnnnnnnnnnnnnnnnnnnnnnnnnnnnnnnnnnnnnnnnnnnnnnnnnnnnnnnnnnnnnnnnnnnnnnnnnnnnnnnnnnnnnnnnnnnnnnnnnnnnnnnnnnnnnnnnnnnnnnnnnnnnnnnnnnnnnnnnnnnnnnnnnnnnnnnnnnnnnnnnnnnnnnnnnnnnnnnnnnnnnnnnnnnnnnnnnnnnnnnnnnnnnnnnnnnnnnnnnnnnnnnnnnnnnnnnnnnnnnnnnnnnnnnnnnnnnnnnnnnnnnnnnnnnnnnnnnnnnnnnnnnnnnnnnnnnnnnnnnnnnnnnnnnnnnnnnnnnnnnnnnnnnnnnnnnnnnnnnnnnnnnnnnnnnnnnnnnnnnnnnnnnnnnnnnnnnnnnnnnnnnnnnnnnnnnnnnnnnnnnnnnnnnnnnnnnnnnnnnnnnnnnnnnnnnnnnnnnnnnnnnnnnnnnnnnnnnnnnnnnnnnnnnnnnnnnnnnnnnnnnnnnnnnnnnnnnnnnnnnnnnnnnnnnnnnnnnnnnnnnnnnnnnnnnnnnnnnnnnnnnnnnnnnnnnnnnnnnnnnnnnnnnnnnnnnnnnnnnnnnnnnnnnnnnnnnnnnnnnnnnnnnnnnnnnnnnnnnnnnnnnnnnnnnnnnnnnnnnnnnnnnnnnnnnnnnnnnnnnnnnnnnnnnnnnnnnnnnnnnnnnnnnnnnnnnnnnnnnnnnnnnnnnnnnnnnnnnnnnnnnnnnnnnnnnnnnnnnnnnnnnnnnnnnnnnnnnnnnnnnnnnnnnnnnnnnnnnnnnnnnnnnnnnnnnnnnnnnnnnnnnnnnnnnnnnnnnnnnnnnnnnnnnnnnnnnnnnnnnnnnnnnnnnnnnnnnnnnnnnnnnnnnnnnnnnnnnnnnnnnnnnnnnnnnnnnnnnnnnnnnnnnnnnnnnnnnnnnnnnnnnnnnnnnnnnnnnnnnnnnnnnnnnnnnnnnnnnnnnnnnnnnnnnnnnnnnnnnnnnnnnnnnnnnnnnnnnnnnnnnnnnnnnnnnnnnnnnnnnnnnnnnnnnnnnnnnnnnnnnnnnnnnnnnnnnnnnnnnnnnnnnnnnnnnnnnnnnnnnnnnnnnnnnnnnnnnnnnnnnnnnnnnnnnnnnnnnnnnnnnnnnnnnnnnnnnnnnnnnnnnnnnnnnnnnnnnnnnnnnnnnnnnnnnnnnnnnnnnnnnnnnnnnnnnnnnnnnnnnnnnnnnnnnnnnnnnnnnnnnnnnnnnnnnnnnnnnnnnnnnnnnnnnnnnnnnnnnnnnnnnnnnnnnnnnnnnnnnnnnnnnnnnnnnnnnnnnnnnnnnnnnnnnnnnnnnnnnnnnnnnnnnnnnnnnnnnnnnnnnnnnnnnnnnnnnnnnnnnnnnnnnnnnnnnnnnnnnnnnnnnnnnnnnnnnnnnnnnnnnnnnnnnnnnnnnnnnnnnnnnnnnnnnnnnnnnnnnnnnnnnnnnnnnnnnnnnnnnnnnnnnnnnnnnnnnnnnnnnnnnnnnnnnnnnnnnnnnnnnnnnnnnnnnnnnnnnnnnnnnnnnnnnnnnnnnnnnnnnnnnnnnnnnnnnnnnnnnnnnnnnnnnnnnnnnnnnnnnnnnnnnnnnnnnnnnnnnnnnnnnnnnnnnnnnnnnnnnnnnnnnnnnnnnnnnnnnnnnnnnnnnnnnnnnnnnnnnnnnnnnnnnnnnnnnnnnnnnnnnnnnnnnnnnnnnnnnnnnnnnnnnnnnnnnnnnnnnnnnnnnnnnnnnnnnnnnnnnnnnnnnnnnnnnnnnnnnnnnnnnnnnnnnnnnnnnnnnnnnnnnnnnnnnnnnnnnnnnnnnnnnnnnnnnnnnnnnnnnnnnnnnnnnnnnnnnnnnnnnnnnnnnnnnnnnnnnnnnnnnnnnnnnnnnnnnnnnnnnnnnnnnnnnnnnnnnnnnnnnnnnnnnnnnnnnnnnnnnnnnnnnnnnnnnnnnnnnnnnnnnnnnnnnnnnnnnnnnnnnnnnnnnnnnnnnnnnnnnnnnnnnnnnnnnnnnnnnnnnnnnnnnnnnnnnnnnnnnnnnnnnnnnnnnnnnnnnnnnnnnnnnnnnnnnnnnnnnnnnnnnnnnnnnnnnnnnnnnnnnnnnnnnnnnnnnnnnnnnnnnnnnnnnnnnnnnnnnnnnnnnnnnnnnnnnnnnnnnnnnnnnnnnnnnnnnnnnnnnnnnnnnnnnnnnnnnnnnnnnnnnnnnnnnnnnnnnnnnnnnnnnnnnnnnnnnnnnnnnnnnnnnnnnnnnnnnnnnnnnnnnnnnnnnnnnnnnnnnnnnnnnnnnnnnnnnnnnnnnnnnnnnnnnnnnnnnnnnnnnnnnnnnnnnnnnnnnnnnnnnnnnnnnnnnnnnnnnnnnnnnnnnnnnnnnnnnnnnnnnnnnnnnnnnnnnnnnnnnnnnnnnnnnnnnnnnnnnnnnnnnnnnnnnnnnnnnnnnnnnnnnnnnnnnnnnnnnnnnnnnnnnnnnnnnnnnnnnnnnnnnnnnnnnnnnnnnnnnnnnnnnnnnnnnnnnnnnnnnnnnnnnnnnnnnnnnnnnnnnnnnnnnnnnnnnnnnnnnnnnnnnnnnnnnnnnnnnnnnnnnnnnnnnnnnnnnnnnnnnnnnnnnnnnnnnnnnnnnnnnnnnnnnnnnnnnnnnnnnnnnnnnnnnnnnnnnnnnnnnnnnnnnnnnnnnnnnnnnnnnnnnnnnnnnnnnnnnnnnnnnnnnnnnnnnnnnnnnnnnnnnnnnnnnnnnnnnnnnnnnnnnnnnnnnnnnnnnnnnnnnnnnnnnnnnnnnnnnnnnnnnnnnnnnnnnnnnnnnnnnnnnnnnnnnnnnnnnnnnnnnnnnnnnnnnnnnnnnnnnnnnnnnnnnnnnnnnnnnnnnnnnnnnnnnnnnnnnnnnnnnnnnnnnnnnnnnnnnnnnnnnnnnnnnnnnnnnnnnnnnnnnnnnnnnnnnnnnnnnnnnnnnnnnnnnnnnnnnnnnnnnnnnnnnnnnnnnnnnnnnnnnnnnnnnnnnnnnnnnnnnnnnnnnnnnnnnnnnnnnnnnnnnnnnnnnnnnnnnnnnnnnnnnnnnnnnnnnnnnnnnnnnnnnnnnnnnnnnnnnnnnnnnnnnnnnnnnnnnnnnnnnnnnnnnnnnnnnnnnnnnnnnnnnnnnnnnnnnnnnnnnnnnnnnnnnnnnnnnnnnnnnnnnnnnnnnnnnnnnnnnnnnnnnnnnnnnnnnnnnnnnnnnnnnnnnnnnnnnnnnnnnnnnnnnnnnnnnnnnnnnnnnnnnnnnnnnnnnnnnnnnnnnnnnnnnnnnnnnnnnnnnnnnnnnnnnnnnnnnnnnnnnnnnnnnnnnnnnnnnnnnnnnnnnnnnnnnnnnnnnnnnnnnnnnnnnnnnnnnnnnnnnnnnnnnnnnnnnnnnnnnnnnnnnnnnnnnnnnnnnnnnnnnnnnnnnnnnnnnnnnnnnnnnnnnnnnnnnnnnnnnnnnnnnnnnnnnnnnnnnnnnnnnnnnnnnnnnnnnnnnnnnnnnnnnnnnnnnnnnnnnnnnnnnnnnnnnnnnnnnnnnnnnnnnnnnnnnnnnnnnnnnnnnnnnnnnnnnnnnnnnnnnnnnnnnnnnnnnnnnnnnnnnnnnnnnnnnnnnnnnnnnnnnnnnnnnnnnnnnnnnnnnnnnnnnnnnnnnnnnnnnnnnnnnnnnnnnnnnnnnnnnnnnnnnnnnnnnnnnnnnnnnnnnnnnnnnnnnnnnnnnnnnnnnnnnnnnnnnnnnnnnnnnnnnnnnnnnnnnnnnnnnnnnnnnnnnnnnnnnnnnnnnnnnnnnnnnnnnnnnnnnnnnnnnnnnnnnnnnnnnnnnnnnnnnnnnnnnnnnnnnnnnnnnnnnnnnnnnnnnnnnnnnnnnnnnnnnnnnnnnnnnnnnnnnnnnnnnnnnnnnnnnnnnnnnnnnnnnnnnnnnnnnnnnnnnnnnnnnnnnnnnnnnnnnnnnnnnnnnnnnnnnnnnnnnnnnnnnnnnnnnnnnnnnnnnnnnnnnnnnnnnnnnnnnnnnnnnnnnnnnnnnnnnnnnnnnnnnnnnnnnnnnnnnnnnnnnnnnnnnnnnnnnnnnnnnnnnnnnnnnnnnnnnnnnnnnnnnnnnnnnnnnnnnnnnnnnnnnnnnnnnnnnnnnnnnnnnnnnnnnnnnnnnnnnnnnnnnnnnnnnnnnnnnnnnnnnnnnnnnnnnnnnnnnnnnnnnnnnnnnnnnnnnnnnnnnnnnnnnnnnnnnnnnnnnnnnnnnnnnnnnnnnnnnnnnnnnnnnnnnnnnnnnnnnnnnnnnnnnnnnnnnnnnnnnnnnnnnnnnnnnnnnnnnnnnnnnnnnnnnnnnnnnnnnnnnnnnnnnnnnnnnnnnnnnnnnnnnnnnnnnnnnnnnnnnnnnnnnnnnnnnnnnnnnnnnnnnnnnnnnnnnnnnnnnnnnnnnnnnnnnnnnnnnnnnnnnnnnnnnnnnnnnnnnnnnnnnnnnnnnnnnnnnnnnnnnnnnnnnnnnnnnnnnnnnnnnnnnnnnnnnnnnnnnnnnnnnnnnnnnnnnnnnnnnnnnnnnnnnnnnnnnnnnnnnnnnnnnnnnnnnnnnnnnnnnnnnnnnnnnnnnnnnnnnnnnnnnnnnnnnnnnnnnnnnnnnnnnnnnnnnnnnnnnnnnnnnnnnnnnnnnnnnnnnnnnnnnnnnnnnnnnnnnnnnnnnnnnnnnnnnnnnnnnnnnnnnnnnnnnnnnnnnnnnnnnnnnnnnnnnnnnnnnnnnnnnnnnnnnnnnnnnnnnnnnnnnnnnnnnnnnnnnnnnnnnnnnnnnnnnnnnnnnnnnnnnnnnnnnnnnnnnnnnnnnnnnnnnnnnnnnnnnnnnnnnnnnnnnnnnnnnnnnnnnnnnnnnnnnnnnnnnnnnnnnnnnnnnnnnnnnnnnnnnnnnnnnnnnnnnnnnnnnnnnnnnnnnnnnnnnnnnnnnnnnnnnnnnnnnnnnnnnnnnnnnnnnnnnnnnnnnnnnnnnnnnnnnnnnnnnnnnnnnnnnnnnnnnnnnnnnnnnnnnnnnnnnnnnnnnnnnnnnnnnnnnnnnnnnnnnnnnnnnnnnnnnnnnnnnnnnnnnnnnnnnnnnnnnnnnnnnnnnnnnnnnnnnnnnnnnnnnnnnnnnnnnnnnnnnnnnnnnnnnnnnnnnnnnnnnnnnnnnnnnnnnnnnnnnnnnnnnnnnnnnnnnnnnnnnnnnnnnnnnnnnnnnnnnnnnnnnnnnnnnnnnnnnnnnnnnnnnnnnnnnnnnnnnnnnnnnnnnnnnnnnnnnnnnnnnnnnnnnnnnnnnnnnnnnnnnnnnnnnnnnnnnnnnnnnnnnnnnnnnnnnnnnnnnnnnnnnnnnnnnnnnnnnnnnnnnnnnnnnnnnnnnnnnnnnnnnnnnnnnnnnnnnnnnnnnnnnnnnnnnnnnnnnnnnnnnnnnnnnnnnnnnnnnnnnnnnnnnnnnnnnnnnnnnnnnnnnnnnnnnnnnnnnnnnnnnnnnnnnnnnnnnnnnnnnnnnnnnnnnnnnnnnnnnnnnnnnnnnnnnnnnnnnnnnnnnnnnnnnnnnnnnnnnnnnnnnnnnnnnnnnnnnnnnnnnnnnnnnnnnnnnnnnnnnnnnnnnnnnnnnnnnnnnnnnnnnnnnnnnnnnnnnnnnnnnnnnnnnnnnnnnnnnnnnnnnnnnnnnnnnnnnnnnnnnnnnnnnnnnnnnnnnnnnnnnnnnnnnnnnnnnnnnnnnnnnnnnnnnnnnnnnnnnnnnnnnnnnnnnnnnnnnnnnnnnnnnnnnnnnnnnnnnnnnnnnnnnnnnnnnnnnnnnnnnnnnnnnnnnnnnnnnnnnnnnnnnnnnnnnnnnnnnnnnnnnnnnnnnnnnnnnnnnnnnnnnnnnnnnnnnnnnnnnnnnnnnnnnnnnnnnnnnnnnnnnnnnnnnnnnnnnnnnnnnnnnnnnnnnnnnnnnnnnnnnnnnnnnnnnnnnnnnnnnnnnnnnnnnnnnnnnnnnnnnnnnnnnnnnnnnnnnnnnnnnnnnnnnnnnnnnnnnnnnnnnnnnnnnnnnnnnnnnnnnnnnnnnnnnnnnnnnnnnnnnnnnnnnnnnnnnnnnnnnnnnnnnnnnnnnnnnnnnnnnnnnnnnnnnnnnnnnnnnnnnnnnnnnnnnnnnnnnnnnnnnnnnnnnnnnnnnnnnnnnnnnnnnnnnnnnnnnnnnnnnnnnnnnnnnnnnnnnnnnnnnnnnnnnnnnnnnnnnnnnnnnnnnnnnnnnnnnnnnnnnnnnnnnnnnnnnnnnnnnnnnnnnnnnnnnnnnnnnnnnnnnnnnnnnnnnnnnnnnnnnnnnnnnnnnnnnnnnnnnnnnnnnnnnnnnnnnnnnnnnnnnnnnnnnnnnnnnnnnnnnnnnnnnnnnnnnnnnnnnnnnnnnnnnnnnnnnnnnnnnnnnnnnnnnnnnnnnnnnnnnnnnnnnnnnnnnnnnnnnnnnnnnnnnnnnnnnnnnnnnnnnnnnnnnnnnnnnnnnnnnnnnnnnnnnnnnnnnnnnnnnnnnnnnnnnnnnnnnnnnnnnnnnnnnnnnnnnnnnnnnnnnnnnnnnnnnnnnnnnnnnnnnnnnnnnnnnnnnnnnnnnnnnnnnnnnnnnnnnnnnnnnnnnnnnnnnnnnnnnnnnnnnnnnnnnnnnnnnnnnnnnnnnnnnnnnnnnnnnnnnnnnnnnnnnnnnnnnnnnnnnnnnnnnnnnnnnnnnnnnnnnnnnnnnnnnnnnnnnnnnnnnnnnnnnnnnnnnnnnnnnnnnnnnnnnnnnnnnnnnnnnnnnnnnnnnnnnnnnnnnnnnnnnnnnnnnnnnnnnnnnnnnnnnnnnnnnnnnnnnnnnnnnnnnnnnnnnnnnnnnnnnnnnnnnnnnnnnnnnnnnnnnnnnnnnnnnnnnnnnnnnnnnnnnnnnnnnnnnnnnnnnnnnnnnnnnnnnnnnnnnnnnnnnnnnnnnnnnnnnnnnnnnnnnnnnnnnnnnnnnnnnnnnnnnnnnnnnnnnnnnnnnnnnnnnnnnnnnnnnnnnnnnnnnnnnnnnnnnnnnnnnnnnnnnnnnnnnnnnnnnnnnnnnnnnnnnnnnnnnnnnnnnnnnnnnnnnnnnnnnnnnnnnnnnnnnnnnnnnnnnnnnnnnnnnnnnnnnnnnnnnnnnnnnnnnnnnnnnnnnnnnnnnnnnnnnnnnnnnnnnnnnnnnnnnnnnnnnnnnnnnnnnnnnnnnnnnnnnnnnnnnnnnnnnnnnnnnnnnnnnnnnnnnnnnnnnnnnnnnnnnnnnnnnnnnnnnnnnnnnnnnnnnnnnnnnnnnnnnnnnnnnnnnnnnnnnnnnnnnnnnnnnnnnnnnnnnnnnnnnnnnnnnnnnnnnnnnnnnnnnnnnnnnnnnnnnnnnnnnnnnnnnnnnnnnnnnnnnnnnnnnnnnnnnnnnnnnnnnnnnnnnnnnnnnnnnnnnnnnnnnnnnnnnnnnnnnnnnnnnnnnnnnnnnnnnnnnnnnnnnnnnnnnnnnnnnnnnnnnnnnnnnnnnnnnnnnnnnnnnnnnnnnnnnnnnnnnnnnnnnnnnnnnnnnnnnnnnnnnnnnnnnnnnnnnnnnnnnnnnnnnnnnnnnnnnnnnnnnnnnnnnnnnnnnnnnnnnnnnnnnnnnnnnnnnnnnnnnnnnnnnnnnnnnnnnnnnnnnnnnnnnnnnnnnnnnnnnnnnnnnnnnnnnnnnnnnnnnnnnnnnnnnnnnnnnnnnnnnnnnnnnnnnnnnnnnnnnnnnnnnnnnnnnnnnnnnnnnnnnnnnnnnnnnnnnnnnnnnnnnnnnnnnnnnnnnnnnnnnnnnnnnnnnnnnnnnnnnnnnnnnnnnnnnnnnnnnnnnnnnnnnnnnnnnnnnnnnnnnnnnnnnnnnnnnnnnnnnnnnnnnnnnnnnnnnnnnnnnnnnnnnnnnnnnnnnnnnnnnnnnnnnnnnnnnnnnnnnnnnnnnnnnnnnnnnnnnnnnnnnnnnnnnnnnnnnnnnnnnnnnnnnnnnnnnnnnnnnnnnnnnnnnnnnnnnnnnnnnnnnnnnnnnnnnnnnnnnnnnnnnnnnnnnnnnnnnnnnnnnnnnnnnnnnnnnnnnnnnnnnnnnnnnnnnnnnnnnnnnnnnnnnnnnnnnnnnnnnnnnnnnnnnnnnnnnnnnnnnnnnnnnnnnnnnnnnnnnnnnnnnnnnnnnnnnnnnnnnnnnnnnnnnnnnnnnnnnnnnnnnnnnnnnnnnnnnnnnnnnnnnnnnnnnnnnnnnnnnnnnnnnnnnnnnnnnnnnnnnnnnnnnnnnnnnnnnnnnnnnnnnnnnnnnnnnnnnnnnnnnnnnnnnnnnnnnnnnnnnnnnnnnnnnnnnnnnnnnnnnnnnnnnnnnnnnnnnnnnnnnnnnnnnnnnnnnnnnnnnnnnnnnnnnnnnnnnnnnnnnnnnnnnnnnnnnnnnnnnnnnnnnnnnnnnnnnnnnnnnnnnnnnnnnnnnnnnnnnnnnnnnnnnnnnnnnnnnnnnnnnnnnnnnnnnnnnnnnnnnnnnnnnnnnnnnnnnnnnnnnnnnnnnnnnnnnnnnnnnnnnnnnnnnnnnnnnnnnnnnnnnnnnnnnnnnnnnnnnnnnnnnnnnnnnnnnnnnnnnnnnnnnnnnnnnnnnnnnnnnnnnnnnnnnnnnnnnnnnnnnnnnnnnnnnnnnnnnnnnnnnnnnnnnnnnnnnnnnnnnnnnnnnnnnnnnnnnnnnnnnnnnnnnnnnnnnnnnnnnnnnnnnnnnnnnnnnnnnnnnnnnnnnnnnnnnnnnnnnnnnnnnnnnnnnnnnnnnnnnnnnnnnnnnnnnnnnnnnnnnnnnnnnnnnnnnnnnnnnnnnnnnnnnnnnnnnnnnnnnnnnnnnnnnnnnnnnnnnnnnnnnnnnnnnnnnnnnnnnnnnnnnnnnnnnnnnnnnnnnnnnnnnnnnnnnnnnnnnnnnnnnnnnnnnnnnnnnnnnnnnnnnnnnnnnnnnnnnnnnnnnnnnnnnnnnnnnnnnnnnnnnnnnnnnnnnnnnnnnnnnnnnnnnnnnnnnnnnnnnnnnnnnnnnnnnnnnnnnnnnnnnnnnnnnnnnnnnnnnnnnnnnnnnnnnnnnnnnnnnnnnnnnnnnnnnnnnnnnnnnnnnnnnnnnnnnnnnnnnnnnnnnnnnnnnnnnnnnnnnnnnnnnnnnnnnnnnnnnnnnnnnnnnnnnnnnnnnnnnnnnnnnnnnnnnnnnnnnnnnnnnnnnnnnnnnnnnnnnnnnnnnnnnnnnnnnnnnnnnnnnnnnnnnnnnnnnnnnnnnnnnnnnnnnnnnnnnnnnnnnnnnnnnnnnnnnnnnnnnnnnnnnnnnnnnnnnnnnnnnnnnnnnnnnnnnnnnnnnnnnnnnnnnnnnnnnnnnnnnnnnnnnnnnnnnnnnnnnnnnnnnnnnnnnnnnnnnnnnnnnnnnnnnnnnnnnnnnnnnnnnnnnnnnnnnnnnnnnnnnnnnnnnnnnnnnnnnnnnnnnnnnnnnnnnnnnnnnnnnnnnnnnnnnnnnnnnnnnnnnnnnnnnnnnnnnnnnnnnnnnnnnnnnnnnnnnnnnnnnnnnnnnnnnnnnnnnnnnnnnnnnnnnnnnnnnnnnnnnnnnnnnnnnnnnnnnnnnnnnnnnnnnnnnnnnnnnnnnnnnnnnnnnnnnnnnnnnnnnnnnnnnnnnnnnnnnnnnnnnnnnnnnnnnnnnnnnnnnnnnnnnnnnnnnnnnnnnnnnnnnnnnnnnnnnnnnnnnnnnnnnnnnnnnnnnnnnnnnnnnnnnnnnnnnnnnnnnnnnnnnnnnnnnnnnnnnnnnnnnnnnnnnnnnnnnnnnnnnnnnnnnnnnnnnnnnnnnnnnnnnnnnnnnnnnnnnnnnnnnnnnnnnnnnnnnnnnnnnnnnnnnnnnnnnnnnnnnnnnnnnnnnnnnnnnnnnnnnnnnnnnnnnnnnnnnnnnnnnnnnnnnnnnnnnnnnnnnnnnnnnnnnnnnnnnnnnnnnnnnnnnnnnnnnnnnnnnnnnnnnnnnnnnnnnnnnnnnnnnnnnnnnnnnnnnnnnnnnnnnnnnnnnnnnnnnnnnnnnnnnnnnnnnnnnnnnnnnnnnnnnnnnnnnnnnnnnnnnnnnnnnnnnnnnnnnnnnnnnnnnnnnnnnnnnnnnnnnnnnnnnnnnnnnnnnnnnnnnnnnnnnnnnnnnnnnnnnnnnnnnnnnnnnnnnnnnnnnnnnnnnnnnnnnnnnnnnnnnnnnnnnnnnnnnnnnnnnnnnnnnnnnnnnnnnnnnnnnnnnnnnnnnnnnnnnnnnnnnnnnnnnnnnnnnnnnnnnnnnnnnnnnnnnnnnnnnnnnnnnnnnnnnnnnnnnnnnnnnnnnnnnnnnnnnnnnnnnnnnnnnnnnnnnnnnnnnnnnnnnnnnnnnnnnnnnnnnnnnnnnnnnnnnnnnnnnnnnnnnnnnnnnnnnnnnnnnnnnnnnnnnnnnnnnnnnnnnnnnnnnnnnnnnnnnnnnnnnnnnnnnnnnnnnnnnnnnnnnnnnnnnnnnnnnnnnnnnnnnnnnnnnnnnnnnnnnnnnnnnnnnnnnnnnnnnnnnnnnnnnnnnnnnnnnnnnnnnnnnnnnnnnnnnnnnnnnnnnnnnnnnnnnnnnnnnnnnnnnnnnnnnnnnnnnnnnnnnnnnnnnnnnnnnnnnnnnnnnnnnnnnnnnnnnnnnnnnnnnnnnnnnnnnnnnnnnnnnnnnnnnnnnnnnnnnnnnnnnnnnnnnnnnnnnnnnnnnnnnnnnnnnnnnnnnnnnnnnnnnnnnnnnnnnnnnnnnnnnnnnnnnnnnnnnnnnnnnnnnnnnnnnnnnnnnnnnnnnnnnnnnnnnnnnnnnnnnnnnnnnnnnnnnnnnnnnnnnnnnnnnnnnnnnnnnnnnnnnnnnnnnnnnnnnnnnnnnnnnnnnnnnnnnnnnnnnnnnnnnnnnnnnnnnnnnnnnnnnnnnnnnnnnnnnnnnnnnnnnnnnnnnnnnnnnnnnnnnnnnnnnnnnnnnnnnnnnnnnnnnnnnnnnnnnnnnnnnnnnnnnnnnnnnnnnnnnnnnnnnnnnnnnnnnnnnnnnnnnnnnnnnnnnnnnnnnnnnnnnnnnnnnnnnnnnnnnnnnnnnnnnnnnnnnnnnnnnnnnnnnnnnnnnnnnnnnnnnnnnnnnnnnnnnnnnnnnnnnnnnnnnnnnnnnnnnnnnnnnnnnnnnnnnnnnnnnnnnnnnnnnnnnnnnnnnnnnnnnnnnnnnnnnnnnnnnnnnnnnnnnnnnnnnnnnnnnnnnnnnnnnnnnnnnnnnnnnnnnnnnnnnnnnnnnnnnnnnnnnnnnnnnnnnnnnnnnnnnnnnnnnnnnnnnnnnnnnnnnnnnnnnnnnnnnnnnnnnnnnnnnnnnnnnnnnnnnnnnnnnnnnnnnnnnnnnnnnnnnnnnnnnnnnnnnnnnnnnnnnnnnnnnnnnnnnnnnnnnnnnnnnnnnnnnnnnnnnnnnnnnnnnnnnnnnnnnnnnnnnnnnnnnnnnnnnnnnnnnnnnnnnnnnnnnnnnnnnnnnnnnnnnnnnnnnnnnnnnnnnnnnnnnnnnnnnnnnnnnnnnnnnnnnnnnnnnnnnnnnnnnnnnnnnnnnnnnnnnnnnnnnnnnnnnnnnnnnnnnnnnnnnnnnnnnnnnnnnnnnnnnnnnnnnnnnnnnnnnnnnnnnnnnnnnnnnnnnnnnnnnnnnnnnnnnnnnnnnnnnnnnnnnnnnnnnnnnnnnnnnnnnnnnnnnnnnnnnnnnnnnnnnnnnnnnnnnnnnnnnnnnnnnnnnnnnnnnnnnnnnnnnnnnnnnnnnnnnnnnnnnnnnnnnnnnnnnnnnnnnnnnnnnnnnnnnnnnnnnnnnnnnnnnnnnnnnnnnnnnnnnnnnnnnnnnnnnnnnnnnnnnnnnnnnnnnnnnnnnnnnnnnnnnnnnnnnnnnnnnnnnnnnnnnnnnnnnnnnnnnnnnnnnnnnnnnnnnnnnnnnnnnnnnnnnnnnnnnnnnnnnnnnnnnnnnnnnnnnnnnnnnnnnnnnnnnnnnnnnnnnnnnnnnnnnnnnnnnnnnnnnnnnnnnnnnnnnnnnnnnnnnnnnnnnnnnnnnnnnnnnnnnnnnnnnnnnnnnnnnnnnnnnnnnnnnnnnnnnnnnnnnnnnnnnnnnnnnnnnnnnnnnnnnnnnnnnnnnnnnnnnnnnnnnnnnnnnnnnnnnnnnnnnnnnnnnnnnnnnnnnnnnnnnnnnnnnnnnnnnnnnnnnnnnnnnnnnnnnnnnnnnnnnnnnnnnnnnnnnnnnnnnnnnnnnnnnnnnnnnnnnnnnnnnnnnnnnnnnnnnnnnnnnnnnnnnnnnnnnnnnnnnnnnnnnnnnnnnnnnnnnnnnnnnnnnnnnnnnnnnnnnnnnnnnnnnnnnnnnnnnnnnnnnnnnnnnnnnnnnnnnnnnnnnnnnnnnnnnnnnnnnnnnnnnnnnnnnnnnnnnnnnnnnnnnnnnnnnnnnnnnnnnnnnnnnnnnnnnnnnnnnnnnnnnnnnnnnnnnnnnnnnnnnnnnnnnnnnnnnnnnnnnnnnnnnnnnnnnnnnnnnnnnnnnnnnnnnnnnnnnnnnnnnnnnnnnnnnnnnnnnnnnnnnnnnnnnnnnnnnnnnnnnnnnnnnnnnnnnnnnnnnnnnnnnnnnnnnnnnnnnnnnnnnnnnnnnnnnnnnnnnnnnnnnnnnnnnnnnnnnnnnnnnnnnnnnnnnnnnnnnnnnnnnnnnnnnnnnnnnnnnnnnnnnnnnnnnnnnnnnnnnnnnnnnnnnnnnnnnnnnnnnnnnnnnnnnnnnnnnnnnnnnnnnnnnnnnnnnnnnnnnnnnnnnnnnnnnnnnnnnnnnnnnnnnnnnnnnnnnnnnnnnnnnnnnnnnnnnnnnnnnnnnnnnnnnnnnnnnnnnnnnnnnnnnnnnnnnnnnnnnnnnnnnnnnnnnnnnnnnnnnnnnnnnnnnnnnnnnnnnnnnnnnnnnnnnnnnnnnnnnnnnnnnnnnnnnnnnnnnnnnnnnnnnnnnnnnnnnnnnnnnnnnnnnnnnnnnnnnnnnnnnnnnnnnnnnnnnnnnnnnnnnnnnnnnnnnnnnnnnnnnnnnnnnnnnnnnnnnnnnnnnnnnnnnnnnnnnnnnnnnnnnnnnnnnnnnnnnnnnnnnnnnnnnnnnnnnnnnnnnnnnnnnnnnnnnnnnnnnnnnnnnnnnnnnnnnnnnnnnnnnnnnnnnnnnnnnnnnnnnnnnnnnnnnnnnnnnnnnnnnnnnnnnnnnnnnnnnnnnnnnnnnnnnnnnnnnnnnnnnnnnnnnnnnnnnnnnnnnnnnnnnnnnnnnnnnnnnnnnnnnnnnnnnnnnnnnnnnnnnnnnnnnnnnnnnnnnnnnnnnnnnnnnnnnnnnnnnnnnnnnnnnnnnnnnnnnnnnnnnnnnnnnnnnnnnnnnnnnnnnnnnnnnnnnnnnnnnnnnnnnnnnnnnnnnnnnnnnnnnnnnnnnnnnnnnnnnnnnnnnnnnnnnnnnnnnnnnnnnnnnnnnnnnnnnnnnnnnnnnnnnnnnnnnnnnnnnnnnnnnnnnnnnnnnnnnnnnnnnnnnnnnnnnnnnnnnnnnnnnnnnnnnnnnnnnnnnnnnnnnnnnnnnnnnnnnnnnnnnnnnnnnnnnnnnnnnnnnnnnnnnnnnnnnnnnnnnnnnnnnnnnnnnnnnnnnnnnnnnnnnnnnnnnnnnnnnnnnnnnnnnnnnnnnnnnnnnnnnnnnnnnnnnnnnnnnnnnnnnnnnnnnnnnnnnnnnnnnnnnnnnnnnnnnnnnnnnnnnnnnnnnnnnnnnnnnnnnnnnnnnnnnnnnnnnnnnnnnnnnnnnnnnnnnnnnnnnnnnnnnnnnnnnnnnnnnnnnnnnnnnnnnnnnnnnnnnnnnnnnnnnnnnnnnnnnnnnnnnnnnnnnnnnnnnnnnnnnnnnnnnnnnnnnnnnnnnnnnnnnnnnnnnnnnnnnnnnnnnnnnnnnnnnnnnnnnnnnnnnnnnnnnnnnnnnnnnnnnnnnnnnnnnnnnnnnnnnnnnnnnnnnnnnnnnnnnnnnnnnnnnnnnnnnnnnnnnnnnnnnnnnnnnnnnnnnnnnnnnnnnnnnnnnnnnnnnnnnnnnnnnnnnnnnnnnnnnnnnnnnnnnnnnnnnnnnnnnnnnnnnnnnnnnnnnnnnnnnnnnnnnnnnnnnnnnnnnnnnnnnnnnnnnnnnnnnnnnnnnnnnnnnnnnnnnnnnnnnnnnnnnnnnnnnnnnnnnnnnnnnnnnnnnnnnnnnnnnnnnnnnnnnnnnnnnnnnnnnnnnnnnnnnnnnnnnnnnnnnnnnnnnnnnnnnnnnnnnnnnnnnnnnnnnnnnnnnnnnnnnnnnnnnnnnnnnnnnnnnnnnnnnnnnnnnnnnnnnnnnnnnnnnnnnnnnnnnnnnnnnnnnnnnnnnnnnnnnnnnnnnnnnnnnnnnnnnnnnnnnnnnnnnnnnnnnnnnnnnnnnnnnnnnnnnnnnnnnnnnnnnnnnnnnnnnnnnnnnnnnnnnnnnnnnnnnnnnnnnnnnnnnnnnnnnnnnnnnnnnnnnnnnnnnnnnnnnnnnnnnnnnnnnnnnnnnnnnnnnnnnnnnnnnnnnnnnnnnnnnnnnnnnnnnnnnnnnnnnnnnnnnnnnnnnnnnnnnnnnnnnnnnnnnnnnnnnnnnnnnnnnnnnnnnnnnnnnnnnnnnnnnnnnnnnnnnnnnnnnnnnnnnnnnnnnnnnnnnnnnnnnnnnnnnnnnnnnnnnnnnnnnnnnnnnnnnnnnnnnnnnnnnnnnnnnnnnnnnnnnnnnnnnnnnnnnnnnnnnnnnnnnnnnnnnnnnnnnnnnnnnnnnnnnnnnnnnnnnnnnnnnnnnnnnnnnnnnnnnnnnnnnnnnnnnnnnnnnnnnnnnnnnnnnnnnnnnnnnnnnnnnnnnnnnnnnnnnnnnnnnnnnnnnnnnnnnnnnnnnnnnnnnnnnnnnnnnnnnnnnnnnnnnnnnnnnnnnnnnnnnnnnnnnnnnnnnnnnnnnnnnnnnnnnnnnnnnnnnnnnnnnnnnnnnnnnnnnnnnnnnnnnnnnnnnnnnnnnnnnnnnnnnnnnnnnnnnnnnnnnnnnnnnnnnnnnnnnnnnnnnnnnnnnnnnnnnnnnnnnnnnnnnnnnnnnnnnnnnnnnnnnnnnnnnnnnnnnnnnnnnnnnnnnnnnnnnnnnnnnnnnnnnnnnnnnnnnnnnnnnnnnnnnnnnnnnnnnnnnnnnnnnnnnnnnnnnnnnnnnnnnnnnnnnnnnnnnnnnnnnnnnnnnnnnnnnnnnnnnnnnnnnnnnnnnnnnnnnnnnnnnnnnnnnnnnnnnnnnnnnnnnnnnnnnnnnnnnnnnnnnnnnnnnnnnnnnnnnnnnnnnnnnnnnnnnnnnnnnnnnnnnnnnnnnnnnnnnnnnnnnnnnnnnnnnnnnnnnnnnnnnnnnnnnnnnnnnnnnnnnnnnnnnnnnnnnnnnnnnnnnnnnnnnnnnnnnnnnnnnnnnnnnnnnnnnnnnnnnnnnnnnnnnnnnnnnnnnnnnnnnnnnnnnnnnnnnnnnnnnnnnnnnnnnnnnnnnnnnnnnnnnnnnnnnnnnnnnnnnnnnnnnnnnnnnnnnnnnnnnnnnnnnnnnnnnnnnnnnnnnnnnnnnnnnnnnnnnnnnnnnnnnnnnnnnnnnnnnnnnnnnnnnnnnnnnnnnnnnnnnnnnnnnnnnnnnnnnnnnnnnnnnnnnnnnnnnnnnnnnnnnnnnnnnnnnnnnnnnnnnnnnnnnnnnnnnnnnnnnnnnnnnnnnnnnnnnnnnnnnnnnnnnnnnnnnnnnnnnnnnnnnnnnnnnnnnnnnnnnnnnnnnnnnnnnnnnnnnnnnnnnnnnnnnnnnnnnnnnnnnnnnnnnnnnnnnnnnnnnnnnnnnnnnnnnnnnnnnnnnnnnnnnnnnnnnnnnnnnnnnnnnnnnnnnnnnnnnnnnnnnnnnnnnnnnnnnnnnnnnnnnnnnnnnnnnnnnnnnnnnnnnnnnnnnnnnnnnnnnnnnnnnnnnnnnnnnnnnnnnnnnnnnnnnnnnnnnnnnnnnnnnnnnnnnnnnnnnnnnnnnnnnnnnnnnnnnnnnnnnnnnnnnnnnnnnnnnnnnnnnnnnnnnnnnnnnnnnnnnnnnnnnnnnnnnnnnnnnnnnnnnnnnnnnnnnnnnnnnnnnnnnnnnnnnnnnnnnnnnnnnnnnnnnnnnnnnnnnnnnnnnnnnnnnnnnnnnnnnnnnnnnnnnnnnnnnnnnnnnnnnnnnnnnnnnnnnnnnnnnnnnnnnnnnnnnnnnnnnnnnnnnnnnnnnnnnnnnnnnnnnnnnnnnnnnnnnnnnnnnnnnnnnnnnnnnnnnnnnnnnnnnnnnnnnnnnnnnnnnnnnnnnnnnnnnnnnnnnnnnnnnnnnnnnnnnnnnnnnnnnnnnnnnnnnnnnnnnnnnnnnnnnnnnnnnnnnnnnnnnnnnnnnnnnnnnnnnnnnnnnnnnnnnnnnnnnnnnnnnnnnnnnnnnnnnnnnnnnnnnnnnnnnnnnnnnnnnnnnnnnnnnnnnnnnnnnnnnnnnnnnnnnnnnnnnnnnnnnnnnnnnnnnnnnnnnnnnnnnnnnnnnnnnnnnnnnnnnnnnnnnnnnnnnnnnnnnnnnnnnnnnnnnnnnnnnnnnnnnnnnnnnnnnnnnnnnnnnnnnnnnnnnnnnnnnnnnnnnnnnnnnnnnnnnnnnnnnnnnnnnnnnnnnnnnnnnnnnnnnnnnnnnnnnnnnnnnnnnnnnnnnnnnnnnnnnnnnnnnnnnnnnnnnnnnnnnnnnnnnnnnnnnnnnnnnnnnnnnnnnnnnnnnnnnnnnnnnnnnnnnnnnnnnnnnnnnnnnnnnnnnnnnnnnnnnnnnnnnnnnnnnnnnnnnnnnnnnnnnnnnnnnnnnnnnnnnnnnnnnnnnnnnnnnnnnnnnnnnnnnnnnnnnnnnnnnnnnnnnnnnnnnnnnnnnnnnnnnnnnnnnnnnnnnnnnnnnnnnnnnnnnnnnnnnnnnnnnnnnnnnnnnnnnnnnnnnnnnnnnnnnnnnnnnnnnnnnnnnnnnnnnnnnnnnnnnnnnnnnnnnnnnnnnnnnnnnnnnnnnnnnnnnnnnnnnnnnnnnnnnnnnnnnnnnnnnnnnnnnnnnnnnnnnnnnnnnnnnnnnnnnnnnnnnnnnnnnnnnnnnnnnnnnnnnnnnnnnnnnnnnnnnnnnnnnnnnnnnnnnnnnnnnnnnnnnnnnnnnnnnnnnnnnnnnnnnnnnnnnnnnnnnnnnnnnnnnnnnnnnnnnnnnnnnnnnnnnnnnnnnnnnnnnnnnnnnnnnnnnnnnnnnnnnnnnnnnnnnnnnnnnnnnnnnnnnnnnnnnnnnnnnnnnnnnnnnnnnnnnnnnnnnnnnnnnnnnnnnnnnnnnnnnnnnnnnnnnnnnnnnnnnnnnnnnnnnnnnnnnnnnnnnnnnnnnnnnnnnnnnnnnnnnnnnnnnnnnnnnnnnnnnnnnnnnnnnnnnnnnnnnnnnnnnnnnnnnnnnnnnnnnnnnnnnnnnnnnnnnnnnnnnnnnnnnnnnnnnnnnnnnnnnnnnnnnnnnnnnnnnnnnnnnnnnnnnnnnnnnnnnnnnnnnnnnnnnnnnnnnnnnnnnnnnnnnnnnnnnnnnnnnnnnnnnnnnnnnnnnnnnnnnnnnnnnnnnnnnnnnnnnnnnnnnnnnnnnnnnnnnnnnnnnnnnnnnnnnnnnnnnnnnnnnnnnnnnnnnnnnnnnnnnnnnnnnnnnnnnnnnnnnnnnnnnnnnnnnnnnnnnnnnnnnnnnnnnnnnnnnnnnnnnnnnnnnnnnnnnnnnnnnnnnnnnnnnnnnnnnnnnnnnnnnnnnnnnnnnnnnnnnnnnnnnnnnnnnnnnnnnnnnnnnnnnnnnnnnnnnnnnnnnnnnnnnnnnnnnnnnnnnnnnnnnnnnnnnnnnnnnnnnnnnnnnnnnnnnnnnnnnnnnnnnnnnnnnnnnnnnnnnnnnnnnnnnnnnnnnnnnnnnnnnnnnnnnnnnnnnnnnnnnnnnnnnnnnnnnnnnnnnnnnnnnnnnnnnnnnnnnnnnnnnnnnnnnnnnnnnnnnnnnnnnnnnnnnnnnnnnnnnnnnnnnnnnnnnnnnnnnnnnnnnnnnnnnnnnnnnnnnnnnnnnnnnnnnnnnnnnnnnnnnnnnnnnnnnnnnnnnnnnnnnnnnnnnnnnnnnnnnnnnnnnnnnnnnnnnnnnnnnnnnnnnnnnnnnnnnnnnnnnnnnnnnnnnnnnnnnnnnnnnnnnnnnnnnnnnnnnnnnnnnnnnnnnnnnnnnnnnnnnnnnnnnnnnnnnnnnnnnnnnnnnnnnnnnnnnnnnnnnnnnnnnnnnnnnnnnnnnnnnnnnnnnnnnnnnnnnnnnnnnnnnnnnnnnnnnnnnnnnnnnnnnnnnnnnnnnnnnnnnnnnnnnnnnnnnnnnnnnnnnnnnnnnnnnnnnnnnnnnnnnnnnnnnnnnnnnnnnnnnnnnnnnnnnnnnnnnnnnnnnnnnnnnnnnnnnnnnnnnnnnnnnnnnnnnnnnnnnnnnnnnnnnnnnnnnnnnnnnnnnnnnnnnnnnnnnnnnnnnnnnnnnnnnnnnnnnnnnnnnnnnnnnnnnnnnnnnnnnnnnnnnnnnnnnnnnnnnnnnnnnnnnnnnnnnnnnnnnnnnnnnnnnnnnnnnnnnnnnnnnnnnnnnnnnnnnnnnnnnnnnnnnnnnnnnnnnnnnnnnnnnnnnnnnnnnnnnnnnnnnnnnnnnnnnnnnnnnnnnnnnnnnnnnnnnnnnnnnnnnnnnnnnnnnnnnnnnnnnnnnnnnnnnnnnnnnnnnnnnnnnnnnnnnnnnnnnnnnnnnnnnnnnnnnnnnnnnnnnnnnnnnnnnnnnnnnnnnnnnnnnnnnnnnnnnnnnnnnnnnnnnnnnnnnnnnnnnnnnnnnnnnnnnnnnnnnnnnnnnnnnnnnnnnnnnnnnnnnnnnnnnnnnnnnnnnnnnnnnnnnnnnnnnnnnnnnnnnnnnnnnnnnnnnnnnnnnnnnnnnnnnnnnnnnnnnnnnnnnnnnnnnnnnnnnnnnnnnnnnnnnnnnnnnnnnnnnnnnnnnnnnnnnnnnnnnnnnnnnnnnnnnnnnnnnnnnnnnnnnnnnnnnnnnnnnnnnnnnnnnnnnnnnnnnnnnnnnnnnnnnnnnnnnnnnnnnnnnnnnnnnnnnnnnnnnnnnnnnnnnnnnnnnnnnnnnnnnnnnnnnnnnnnnnnnnnnnnnnnnnnnnnnnnnnnnnnnnnnnnnnnnnnnnnnnnnnnnnnnnnnnnnnnnnnnnnnnnnnnnnnnnnnnnnnnnnnnnnnnnnnnnnnnnnnnnnnnnnnnnnnnnnnnnnnnnnnnnnnnnnnnnnnnnnnnnnnnnnnnnnnnnnnnnnnnnnnnnnnnnnnnnnnnnnnnnnnnnnnnnnnnnnnnnnnnnnnnnnnnnnnnnnnnnnnnnnnnnnnnnnnnnnnnnnnnnnnnnnnnnnnnnnnnnnnnnnnnnnnnnnnnnnnnnnnnnnnnnnnnnnnnnnnnnnnnnnnnnnnnnnnnnnnnnnnnnnnnnnnnnnnnnnnnnnnnnnnnnnnnnnnnnnnnnnnnnnnnnnnnnnnnnnnnnnnnnnnnnnnnnnnnnnnnnnnnnnnnnnnnnnnnnnnnnnnnnnnnnnnnnnnnnnnnnnnnnnnnnnnnnnnnnnnnnnnnnnnnnnnnnnnnnnnnnnnnnnnnnnnnnnnnnnnnnnnnnnnnnnnnnnnnnnnnnnnnnnnnnnnnnnnnnnnnnnnnnnnnnnnnnnnnnnnnnnnnnnnnnnnnnnnnnnnnnnnnnnnnnnnnnnnnnnnnnnnnnnnnnnnnnnnnnnnnnnnnnnnnnnnnnnnnnnnnnnnnnnnnnnnnnnnnnnnnnnnnnnnnnnnnnnnnnnnnnnnnnnnnnnnnnnnnnnnnnnnnnnnnnnnnnnnnnnnnnnnnnnnnnnnnnnnnnnnnnnnnnnnnnnnnnnnnnnnnnnnnnnnnnnnnnnnnnnnnnnnnnnnnnnnnnnnnnnnnnnnnnnnnnnnnnnnnnnnnnnnnnnnnnnnnnnnnnnnnnnnnnnnnnnnnnnnnnnnnnnnnnnnnnnnnnnnnnnnnnnnnnnnnnnnnnnnnnnnnnnnnnnnnnnnnnnnnnnnnnnnnnnnnnnnnnnnnnnnnnnnnnnnnnnnnnnnnnnnnnnnnnnnnnnnnnnnnnnnnnnnnnnnnnnnnnnnnnnnnnnnnnnnnnnnnnnnnnnnnnnnnnnnnnnnnnnnnnnnnnnnnnnnnnnnnnnnnnnnnnnnnnnnnnnnnnnnnnnnnnnnnnnnnnnnnnnnnnnnnnnnnnnnnnnnnnnnnnnnnnnnnnnnnnnnnnnnnnnnnnnnnnnnnnnnnnnnnnnnnnnnnnnnnnnnnnnnnnnnnnnnnnnnnnnnnnnnnnnnnnnnnnnnnnnnnnnnnnnnnnnnnnnnnnnnnnnnnnnnnnnnnnnnnnnnnnnnnnnnnnnnnnnnnnnnnnnnnnnnnnnnnnnnnnnnnnnnnnnnnnnnnnnnnnnnnnnnnnnnnnnnnnnnnnnnnnnnnnnnnnnnnnnnnnnnnnnnnnnnnnnnnnnnnnnnnnnnnnnnnnnnnnnnnnnnnnnnnnnnnnnnnnnnnnnnnnnnnnnnnnnnnnnnnnnnnnnnnnnnnnnnnnnnnnnnnnnnnnnnnnnnnnnnnnnnnnnnnnnnnnnnnnnnnnnnnnnnnnnnnnnnnnnnnnnnnnnnnnnnnnnnnnnnnnnnnnnnnnnnnnnnnnnnnnnnnnnnnnnnnnnnnnnnnnnnnnnnnnnnnnnnnnnnnnnnnnnnnnnnnnnnnnnnnnnnnnnnnnnnnnnnnnnnnnnnnnnnnnnnnnnnnnnnnnnnnnnnnnnnnnnnnnnnnnnnnnnnnnnnnnnnnnnnnnnnnnnnnnnnnnnnnnnnnnnnnnnnnnnnnnnnnnnnnnnnnnnnnnnnnnnnnnnnnnnnnnnnnnnnnnnnnnnnnnnnnnnnnnnnnnnnnnnnnnnnnnnnnnnnnnnnnnnnnnnnnnnnnnnnnnnnnnnnnnnnnnnnnnnnnnnnnnnnnnnnnnnnnnnnnnnnnnnnnnnnnnnnnnnnnnnnnnnnnnnnnnnnnnnnnnnnnnnnnnnnnnnnnnnnnnnnnnnnnnnnnnnnnnnnnnnnnnnnnnnnnnnnnnnnnnnnnnnnnnnnnnnnnnnnnnnnnnnnnnnnnnnnnnnnnnnnnnnnnnnnnnnnnnnnnnnnnnnnnnnnnnnnnnnnnnnnnnnnnnnnnnnnnnnnnnnnnnnnnnnnnnnnnnnnnnnnnnnnnnnnnnnnnnnnnnnnnnnnnnnnnnnnnnnnnnnnnnnnnnnnnnnnnnnnnnnnnnnnnnnnnnnnnnnnnnnnnnnnnnnnnnnnnnnnnnnnnnnnnnnnnnnnnnnnnnnnnnnnnnnnnnnnnnnnnnnnnnnnnnnnnnnnnnnnnnnnnnnnnnnnnnnnnnnnnnnnnnnnnnnnnnnnnnnnnnnnnnnnnnnnnnnnnnnnnnnnnnnnnnnnnnnnnnnnnnnnnnnnnnnnnnnnnnnnnnnnnnnnnnnnnnnnnnnnnnnnnnnnnnnnnnnnnnnnnnnnnnnnnnnnnnnnnnnnnnnnnnnnnnnnnnnnnnnnnnnnnnnnnnnnnnnnnnnnnnnnnnnnnnnnnnnnnnnnnnnnnnnnnnnnnnnnnnnnnnnnnnnnnnnnnnnnnnnnnnnnnnnnnnnnnnnnnnnnnnnnnnnnnnnnnnnnnnnnnnnnnnnnnnnnnnnnnnnnnnnnnnnnnnnnnnnnnnnnnnnnnnnnnnnnnnnnnnnnnnnnnnnnnnnnnnnnnnnnnnnnnnnnnnnnnnnnnnnnnnnnnnnnnnnnnnnnnnnnnnnnnnnnnnnnnnnnnnnnnnnnnnnnnnnnnnnnnnnnnnnnnnnnnnnnnnnnnnnnnnnnnnnnnnnnnnnnnnnnnnnnnnnnnnnnnnnnnnnnnnnnnnnnnnnnnnnnnnnnnnnnnnnnnnnnnnnnnnnnnnnnnnnnnnnnnnnnnnnnnnnnnnnnnnnnnnnnnnnnnnnnnnnnnnnnnnnnnnnnnnnnnnnnnnnnnnnnnnnnnnnnnnnnnnnnnnnnnnnnnnnnnnnnnnnnnnnnnnnnnnnnnnnnnnnnnnnnnnnnnnnnnnnnnnnnnnnnnnnnnnnnnnnnnnnnnnnnnnnnnnnnnnnnnnnnnnnnnnnnnnnnnnnnnnnnnnnnnnnnnnnnnnnnnnnnnnnnnnnnnnnnnnnnnnnnnnnnnnnnnnnnnnnnnnnnnnnnnnnnnnnnnnnnnnnnnnnnnnnnnnnnnnnnnnnnnnnnnnnnnnnnnnnnnnnnnnnnnnnnnnnnnnnnnnnnnnnnnnnnnnnnnnnnnnnnnnnnnnnnnnnnnnnnnnnnnnnnnnnnnnnnnnnnnnnnnnnnnnnnnnnnnnnnnnnnnnnnnnnnnnnnnnnnnnnnnnnnnnnnnnnnnnnnnnnnnnnnnnnnnnnnnnnnnnnnnnnnnnnnnnnnnnnnnnnnnnnnnnnnnnnnnnnnnnnnnnnnnnnnnnnnnnnnnnnnnnnnnnnnnnnnnnnnnnnnnnnnnnnnnnnnnnnnnnnnnnnnnnnnnnnnnnnnnnnnnnnnnnnnnnnnnnnnnnnnnnnnnnnnnnnnnnnnnnnnnnnnnnnnnnnnnnnnnnnnnnnnnnnnnnnnnnnnnnnnnnnnnnnnnnnnnnnnnnnnnnnnnnnnnnnnnnnnnnnnnnnnnnnnnnnnnnnnnnnnnnnnnnnnnnnnnnnnnnnnnnnnnnnnnnnnnnnnnnnnnnnnnnnnnnnnnnnnnnnnnnnnnnnnnnnnnnnnnnnnnnnnnnnnnnnnnnnnnnnnnnnnnnnnnnnnnnnnnnnnnnnnnnnnnnnnnnnnnnnnnnnnnnnnnnnnnnnnnnnnnnnnnnnnnnnnnnnnnnnnnnnnnnnnnnnnnnnnnnnnnnnnnnnnnnnnnnnnnnnnnnnnnnnnnnnnnnnnnnnnnnnnnnnnnnnnnnnnnnnnnnnnnnnnnnnnnnnnnnnnnnnnnnnnnnnnnnnnnnnnnnnnnnnnnnnnnnnnnnnnnnnnnnnnnnnnnnnnnnnnnnnnnnnnnnnnnnnnnnnnnnnnnnnnnnnnnnnnnnnnnnnnnnnnnnnnnnnnnnnnnnnnnnnnnnnnnnnnnnnnnnnnnnnnnnnnnnnnnnnnnnnnnnnnnnnnnnnnnnnnnnnnnnnnnnnnnnnnnnnnnnnnnnnnnnnnnnnnnnnnnnnnnnnnnnnnnnnnnnnnnnnnnnnnnnnnnnnnnnnnnnnnnnnnnnnnnnnnnnnnnnnnnnnnnnnnnnnnnnnnnnnnnnnnnnnnnnnnnnnnnnnnnnnnnnnnnnnnnnnnnnnnnnnnnnnnnnnnnnnnnnnnnnnnnnnnnnnnnnnnnnnnnnnnnnnnnnnnnnnnnnnnnnnnnnnnnnnnnnnnnnnnnnnnnnnnnnnnnnnnnnnnnnnnnnnnnnnnnnnnnnnnnnnnnnnnnnnnnnnnnnnnnnnnnnnnnnnnnnnnnnnnnnnnnnnnnnnnnnnnnnnnnnnnnnnnnnnnnnnnnnnnnnnnnnnnnnnnnnnnnnnnnnnnnnnnnnnnnnnnnnnnnnnnnnnnnnnnnnnnnnnnnnnnnnnnnnnnnnnnnnnnnnnnnnnnnnnnnnnnnnnnnnnnnnnnnnnnnnnnnnnnnnnnnnnnnnnnnnnnnnnnnnnnnnnnnnnnnnnnnnnnnnnnnnnnnnnnnnnnnnnnnnnnnnnnnnnnnnnnnnnnnnnnnnnnnnnnnnnnnnnnnnnnnnnnnnnnnnnnnnnnnnnnnnnnnnnnnnnnnnnnnnnnnnnnnnnnnnnnnnnnnnnnnnnnnnnnnnnnnnnnnnnnnnnnnnnnnnnnnnnnnnnnnnnnnnnnnnnnnnnnnnnnnnnnnnnnnnnnnnnnnnnnnnnnnnnnnnnnnnnnnnnnnnnnnnnnnnnnnnnnnnnnnnnnnnnnnnnnnnnnnnnnnnnnnnnnnnnnnnnnnnnnnnnnnnnnnnnnnnnnnnnnnnnnnnnnnnnnnnnnnnnnnnnnnnnnnnnnnnnnnnnnnnnnnnnnnnnnnnnnnnnnnnnnnnnnnnnnnnnnnnnnnnnnnnnnnnnnnnnnnnnnnnnnnnnnnnnnnnnnnnnnnnnnnnnnnnnnnnnnnnnnnnnnnnnnnnnnnnnnnnnnnnnnnnnnnnnnnnnnnnnnnnnnnnnnnnnnnnnnnnnnnnnnnnnnnnnnnnnnnnnnnnnnnnnnnnnnnnnnnnnnnnnnnnnnnnnnnnnnnnnnnnnnnnnnnnnnnnnnnnnnnnnnnnnnnnnnnnnnnnnnnnnnnnnnnnnnnnnnnnnnnnnnnnnnnnnnnnnnnnnnnnnnnnnnnnnnnnnnnnnnnnnnnnnnnnnnnnnnnnnnnnnnnnnnnnnnnnnnnnnnnnnnnnnnnnnnnnnnnnnnnnnnnnnnnnnnnnnnnnnnnnnnnnnnnnnnnnnnnnnnnnnnnnnnnnnnnnnnnnnnnnnnnnnnnnnnnnnnnnnnnnnnnnnnnnnnnnnnnnnnnnnnnnnnnnnnnnnnnnnnnnnnnnnnnnnnnnnnnnnnnnnnnnnnnnnnnnnnnnnnnnnnnnnnnnnnnnnnnnnnnnnnnnnnnnnnnnnnnnnnnnnnnnnnnnnnnnnnnnnnnnnnnnnnnnnnnnnnnnnnnnnnnnnnnnnnnnnnnnnnnnnnnnnnnnnnnnnnnnnnnnnnnnnnnnnnnnnnnnnnnnnnnnnnnnnnnnnnnnnnnnnnnnnnnnnnnnnnnnnnnnnnnnnnnnnnnnnnnnnnnnnnnnnnnnnnnnnnnnnnnnnnnnnnnnnnnnnnnnnnnnnnnnnnnnnnnnnnnnnnnnnnnnnnnnnnnnnnnnnnnnnnnnnnnnnnnnnnnnnnnnnnnnnnnnnnnnnnnnnnnnnnnnnnnnnnnnnnnnnnnnnnnnnnnnnnnnnnnnnnnnnnnnnnnnnnnnnnnnnnnnnnnnnnnnnnnnnnnnnnnnnnnnnnnnnnnnnnnnnnnnnnnnnnnnnnnnnnnnnnnnnnnnnnnnnnnnnnnnnnnnnnnnnnnnnnnnnnnnnnnnnnnnnnnnnnnnnnnnnnnnnnnnnnnnnnnnnnnnnnnnnnnnnnnnnnnnnnnnnnnnnnnnnnnnnnnnnnnnnnnnnnnnnnnnnnnnnnnnnnnnnnnnnnnnnnnnnnnnnnnnnnnnnnnnnnnnnnnnnnnnnnnnnnnnnnnnnnnnnnnnnnnnnnnnnnnnnnnnnnnnnnnnnnnnnnnnnnnnnnnnnnnnnnnnnnnnnnnnnnnnnnnnnnnnnnnnnnnnnnnnnnnnnnnnnnnnnnnnnnnnnnnnnnnnnnnnnnnnnnnnnnnnnnnnnnnnnnnnnnnnnnnnnnnnnnnnnnnnnnnnnnnnnnnnnnnnnnnnnnnnnnnnnnnnnnnnnnnnnnnnnnnnnnnnnnnnnnnnnnnnnnnnnnnnnnnnnnnnnnnnnnnnnnnnnnnnnnnnnnnnnnnnnnnnnnnnnnnnnnnnnnnnnnnnnnnnnnnnnnnnnnnnnnnnnnnnnnnnnnnnnnnnnnnnnnnnnnnnnnnnnnnnnnnnnnnnnnnnnnnnnnnnnnnnnnnnnnnnnnnnnnnnnnnnnnnnnnnnnnnnnnnnnnnnnnnnnnnnnnnnnnnnnnnnnnnnnnnnnnnnnnnnnnnnnnnnnnnnnnnnnnnnnnnnnnnnnnnnnnnnnnnnnnnnnnnnnnnnnnnnnnnnnnnnnnnnnnnnnnnnnnnnnnnnnnnnnnnnnnnnnnnnnnnnnnnnnnnnnnnnnnnnnnnnnnnnnnnnnnnnnnnnnnnnnnnnnnnnnnnnnnnnnnnnnnnnnnnnnnnnnnnnnnnnnnnnnnnnnnnnnnnnnnnnnnnnnnnnnnnnnnnnnnnnnnnnnnnnnnnnnnnnnnnnnnnnnnnnnnnnnnnnnnnnnnnnnnnnnnnnnnnnnnnnnnnnnnnnnnnnnnnnnnnnnnnnnnnnnnnnnnnnnnnnnnnnnnnnnnnnnnnnnnnnnnnnnnnnnnnnnnnnnnnnnnnnnnnnnnnnnnnnnnnnnnnnnnnnnnnnnnnnnnnnnnnnnnnnnnnnnnnnnnnnnnnnnnnnnnnnnnnnnnnnnnnnnnnnnnnnnnnnnnnnnnnnnnnnnnnnnnnnnnnnnnnnnnnnnnnnnnnnnnnnnnnnnnnnnnnnnnnnnnnnnnnnnnnnnnnnnnnnnnnnnnnnnnnnnnnnnnnnnnnnnnnnnnnnnnnnnnnnnnnnnnnnnnnnnnnnnnnnnnnnnnnnnnnnnnnnnnnnnnnnnnnnnnnnnnnnnnnnnnnnnnnnnnnnnnnnnnnnnnnnnnnnnnnnnnnnnnnnnnnnnnnnnnnnnnnnnnnnnnnnnnnnnnnnnnnnnnnnnnnnnnnnnnnnnnnnnnnnnnnnnnnnnnnnnnnnnnnnnnnnnnnnnnnnnnnnnnnnnnnnnnnnnnnnnnnnnnnnnnnnnnnnnnnnnnnnnnnnnnnnnnnnnnnnnnnnnnnnnnnnnnnnnnnnnnnnnnnnnnnnnnnnnnnnnnnnnnnnnnnnnnnnnnnnnnnnnnnnnnnnnnnnnnnnnnnnnnnnnnnnnnnnnnnnnnnnnnnnnnnnnnnnnnnnnnnnnnnnnnnnnnnnnnnnnnnnnnnnnnnnnnnnnnnnnnnnnnnnnnnnnnnnnnnnnnnnnnnnnnnnnnnnnnnnnnnnnnnnnnnnnnnnnnnnnnnnnnnnnnnnnnnnnnnnnnnnnnnnnnnnnnnnnnnnnnnnnnnnnnnnnnnnnnnnnnnnnnnnnnnnnnnnnnnnnnnnnnnnnnnnnnnnnnnnnnnnnnnnnnnnnnnnnnnnnnnnnnnnnnnnnnnnnnnnnnnnnnnnnnnnnnnnnnnnnnnnnnnnnnnnnnnnnnnnnnnnnnnnnnnnnnnnnnnnnnnnnnnnnnnnnnnnnnnnnnnnnnnnnnnnnnnnnnnnnnnnnnnnnnnnnnnnnnnnnnnnnnnnnnnnnnnnnnnnnnnnnnnnnnnnnnnnnnnnnnnnnnnnnnnnnnnnnnnnnnnnnnnnnnnnnnnnnnnnnnnnnnnnnnnnnnnnnnnnnnnnnnnnnnnnnnnnnnnnnnnnnnnnnnnnnnnnnnnnnnnnnnnnnnnnnnnnnnnnnnnnnnnnnnnnnnnnnnnnnnnnnnnnnnnnnnnnnnnnnnnnnnnnnnnnnnnnnnnnnnnnnnnnnnnnnnnnnnnnnnnnnnnnnnnnnnnnnnnnnnnnnnnnnnnnnnnnnnnnnnnnnnnnnnnnnnnnnnnnnnnnnnnnnnnnnnnnnnnnnnnnnnnnnnnnnnnnnnnnnnnnnnnnnnnnnnnnnnnnnnnnnnnnnnnnnnnnnnnnnnnnnnnnnnnnnnnnnnnnnnnnnnnnnnnnnnnnnnnnnnnnnnnnnnnnnnnnnnnnnnnnnnnnnnnnnnnnnnnnnnnnnnnnnnnnnnnnnnnnnnnnnnnnnnnnnnnnnnnnnnnnnnnnnnnnnnnnnnnnnnnnnnnnnnnnnnnnnnnnnnnnnnnnnnnnnnnnnnnnnnnnnnnnnnnnnnnnnnnnnnnnnnnnnnnnnnnnnnnnnnnnnnnnnnnnnnnnnnnnnnnnnnnnnnnnnnnnnnnnnnnnnnnnnnnnnnnnnnnnnnnnnnnnnnnnnnnnnnnnnnnnnnnnnnnnnnnnnnnnnnnnnnnnnnnnnnnnnnnnnnnnnnnnnnnnnnnnnnnnnnnnnnnnnnnnnnnnnnnnnnnnnnnnnnnnnnnnnnnnnnnnnnnnnnnnnnnnnnnnnnnnnnnnnnnnnnnnnnnnnnnnnnnnnnnnnnnnnnnnnnnnnnnnnnnnnnnnnnnnnnnnnnnnnnnnnnnnnnnnnnnnnnnnnnnnnnnnnnnnnnnnnnnnnnnnnnnnnnnnnnnnnnnnnnnnnnnnnnnnnnnnnnnnnnnnnnnnnnnnnnnnnnnnnnnnnnnnnnnnnnnnnnnnnnnnnnnnnnnnnnnnnnnnnnnnnnnnnnnnnnnnnnnnnnnnnnnnnnnnnnnnnnnnnnnnnnnnnnnnnnnnnnnnnnnnnnnnnnnnnnnnnnnnnnnnnnnnnnnnnnnnnnnnnnnnnnnnnnnnnnnnnnnnnnnnnnnnnnnnnnnnnnnnnnnnnnnnnnnnnnnnnnnnnnnnnnnnnnnnnnnnnnnnnnnnnnnnnnnnnnnnnnnnnnnnnnnnnnnnnnnnnnnnnnnnnnnnnnnnnnnnnnnnnnnnnnnnnnnnnnnnnnnnnnnnnnnnnnnnnnnnnnnnnnnnnnnnnnnnnnnnnnnnnnnnnnnnnnnnnnnnnnnnnnnnnnnnnnnnnnnnnnnnnnnnnnnnnnnnnnnnnnnnnnnnnnnnnnnnnnnnnnnnnnnnnnnnnnnnnnnnnnnnnnnnnnnnnnnnnnnnnnnnnnnnnnnnnnnnnnnnnnnnnnnnnnnnnnnnnnnnnnnnnnnnnnnnnnnnnnnnnnnnnnnnnnnnnnnnnnnnnnnnnnnnnnnnnnnnnnnnnnnnnnnnnnnnnnnnnnnnnnnnnnnnnnnnnnnnnnnnnnnnnnnnnnnnnnnnnnnnnnnnnnnnnnnnnnnnnnnnnnnnnnnnnnnnnnnnnnnnnnnnnnnnnnnnnnnnnnnnnnnnnnnnnnnnnnnnnnnnnnnnnnnnnnnnnnnnnnnnnnnnnnnnnnnnnnnnnnnnnnnnnnnnnnnnnnnnnnnnnnnnnnnnnnnnnnnnnnnnnnnnnnnnnnnnnnnnnnnnnnnnnnnnnnnnnnnnnnnnnnnnnnnnnnnnnnnnnnnnnnnnnnnnnnnnnnnnnnnnnnnnnnnnnnnnnnnnnnnnnnnnnnnnnnnnnnnnnnnnnnnnnnnnnnnnnnnnnnnnnnnnnnnnnnnnnnnnnnnnnnnnnnnnnnnnnnnnnnnnnnnnnnnnnnnnnnnnnnnnnnnnnnnnnnnnnnnnnnnnnnnnnnnnnnnnnnnnnnnnnnnnnnnnnnnnnnnnnnnnnnnnnnnnnnnnnnnnnnnnnnnnnnnnnnnnnnnnnnnnnnnnnnnnnnnnnnnnnnnnnnnnnnnnnnnnnnnnnnnnnnnnnnnnnnnnnnnnnnnnnnnnnnnnnnnnnnnnnnnnnnnnnnnnnnnnnnnnnnnnnnnnnnnnnnnnnnnnnnnnnnnnnnnnnnnnnnnnnnnnnnnnnnnnnnnnnnnnnnnnnnnnnnnnnnnnnnnnnnnnnnnnnnnnnnnnnnnnnnnnnnnnnnnnnnnnnnnnnnnnnnnnnnnnnnnnnnnnnnnnnnnnnnnnnnnnnnnnnnnnnnnnnnnnnnnnnnnnnnnnnnnnnnnnnnnnnnnnnnnnnnnnnnnnnnnnnnnnnnnnnnnnnnnnnnnnnnnnnnnnnnnnnnnnnnnnnnnnnnnnnnnnnnnnnnnnnnnnnnnnnnnnnnnnnnnnnnnnnnnnnnnnnnnnnnnnnnnnnnnnnnnnnnnnnnnnnnnnnnnnnnnnnnnnnnnnnnnnnnnnnnnnnnnnnnnnnnnnnnnnnnnnnnnnnnnnnnnnnnnnnnnnnnnnnnnnnnnnnnnnnnnnnnnnnnnnnnnnnnnnnnnnnnnnnnnnnnnnnnnnnnnnnnnnnnnnnnnnnnnnnnnnnnnnnnnnnnnnnnnnnnnnnnnnnnnnnnnnnnnnnnnnnnnnnnnnnnnnnnnnnnnnnnnnnnnnnnnnnnnnnnnnnnnnnnnnnnnnnnnnnnnnnnnnnnnnnnnnnnnnnnnnnnnnnnnnnnnnnnnnnnnnnnnnnnnnnnnnnnnnnnnnnnnnnnnnnnnnnnnnnnnnnnnnnnnnnnnnnnnnnnnnnnnnnnnnnnnnnnnnnnnnnnnnnnnnnnnnnnnnnnnnnnnnnnnnnnnnnnnnnnnnnnnnnnnnnnnnnnnnnnnnnnnnnnnnnnnnnnnnnnnnnnnnnnnnnnnnnnnnnnnnnnnnnnnnnnnnnnnnnnnnnnnnnnnnnnnnnnnnnnnnnnnnnnnnnnnnnnnnnnnnnnnnnnnnnnnnnnnnnnnnnnnnnnnnnnnnnnnnnnnnnnnnnnnnnnnnnnnnnnnnnnnnnnnnnnnnnnnnnnnnnnnnnnnnnnnnnnnnnnnnnnnnnnnnnnnnnnnnnnnnnnnnnnnnnnnnnnnnnnnnnnnnnnnnnnnnnnnnnnnnnnnnnnnnnnnnnnnnnnnnnnnnnnnnnnnnnnnnnnnnnnnnnnnnnnnnnnnnnnnnnnnnnnnnnnnnnnnnnnnnnnnnnnnnnnnnnnnnnnnnnnnnnnnnnnnnnnnnnnnnnnnnnnnnnnnnnnnnnnnnnnnnnnnnnnnnnnnnnnnnnnnnnnnnnnnnnnnnnnnnnnnnnnnnnnnnnnnnnnnnnnnnnnnnnnnnnnnnnnnnnnnnnnnnnnnnnnnnnnnnnnnnnnnnnnnnnnnnnnnnnnnnnnnnnnnnnnnnnnnnnnnnnnnnnnnnnnnnnnnnnnnnnnnnnnnnnnnnnnnnnnnnnnnnnnnnnnnnnnnnnnnnnnnnnnnnnnnnnnnnnnnnnnnnnnnnnnnnnnnnnnnnnnnnnnnnnnnnnnnnnnnnnnnnnnnnnnnnnnnnnnnnnnnnnnnnnnnnnnnnnnnnnnnnnnnnnnnnnnnnnnnnnnnnnnnnnnnnnnnnnnnnnnnnnnnnnnnnnnnnnnnnnnnnnnnnnnnnnnnnnnnnnnnnnnnnnnnnnnnnnnnnnnnnnnnnnnnnnnnnnnnnnnnnnnnnnnnnnnnnnnnnnnnnnnnnnnnnnnnnnnnnnnnnnnnnnnnnnnnnnnnnnnnnnnnnnnnnnnnnnnnnnnnnnnnnnnnnnnnnnnnnnnnnnnnnnnnnnnnnnnnnnnnnnnnnnnnnnnnnnnnnnnnnnnnnnnnnnnnnnnnnnnnnnnnnnnnnnnnnnnnnnnnnnnnnnnnnnnnnnnnnnnnnnnnnnnnnnnnnnnnnnnnnnnnnnnnnnnnnnnnnnnnnnnnnnnnnnnnnnnnnnnnnnnnnnnnnnnnnnnnnnnnnnnnnnnnnnnnnnnnnnnnnnnnnnnnnnnnnnnnnnnnnnnnnnnnnnnnnnnnnnnnnnnnnnnnnnnnnnnnnnnnnnnnnnnnnnnnnnnnnnnnnnnnnnnnnnnnnnnnnnnnnnnnnnnnnnnnnnnnnnnnnnnnnnnnnnnnnnnnnnnnnnnnnnnnnnnnnnnnnnnnnnnnnnnnnnnnnnnnnnnnnnnnnnnnnnnnnnnnnnnnnnnnnnnnnnnnnnnnnnnnnnnnnnnnnnnnnnnnnnnnnnnnnnnnnnnnnnnnnnnnnnnnnnnnnnnnnnnnnnnnnnnnnnnnnnnnnnnnnnnnnnnnnnnnnnnnnnnnnnnnnnnnnnnnnnnnnnnnnnnnnnnnnnnnnnnnnnnnnnnnnnnnnnnnnnnnnnnnnnnnnnnnnnnnnnnnnnnnnnnnnnnnnnnnnnnnnnnnnnnnnnnnnnnnnnnnnnnnnnnnnnnnnnnnnnnnnnnnnnnnnnnnnnnnnnnnnnnnnnnnnnnnnnnnnnnnnnnnnnnnnnnnnnnnnnnnnnnnnnnnnnnnnnnnnnnnnnnnnnnnnnnnnnnnnnnnnnnnnnnnnnnnnnnnnnnnnnnnnnnnnnnnnnnnnnnnnnnnnnnnnnnnnnnnnnnnnnnnnnnnnnnnnnnnnnnnnnnnnnnnnnnnnnnnnnnnnnnnnnnnnnnnnnnnnnnnnnnnnnnnnnnnnnnnnnnnnnnnnnnnnnnnnnnnnnnnnnnnnnnnnnnnnnnnnnnnnnnnnnnnnnnnnnnnnnnnnnnnnnnnnnnnnnnnnnnnnnnnnnnnnnnnnnnnnnnnnnnnnnnnnnnnnnnnnnnnnnnnnnnnnnnnnnnnnnnnnnnnnnnnnnnnnnnnnnnnnnnnnnnnnnnnnnnnnnnnnnnnnnnnnnnnnnnnnnnnnnnnnnnnnnnnnnnnnnnnnnnnnnnnnnnnnnnnnnnnnnnnnnnnnnnnnnnnnnnnnnnnnnnnnnnnnnnnnnnnnnnnnnnnnnnnnnnnnnnnnnnnnnnnnnnnnnnnnnnnnnnnnnnnnnnnnnnnnnnnnnnnnnnnnnnnnnnnnnnnnnnnnnnnnnnnnnnnnnnnnnnnnnnnnnnnnnnnnnnnnnnnnnnnnnnnnnnnnnnnnnnnnnnnnnnnnnnnnnnnnnnnnnnnnnnnnnnnnnnnnnnnnnnnnnnnnnnnnnnnnnnnnnnnnnnnnnnnnnnnnnnnnnnnnnnnnnnnnnnnnnnnnnnnnnnnnnnnnnnnnnnnnnnnnnnnnnnnnnnnnnnnnnnnnnnnnnnnnnnnnnnnnnnnnnnnnnnnnnnnnnnnnnnnnnnnnnnnnnnnnnnnnnnnnnnnnnnnnnnnnnnnnnnnnnnnnnnnnnnnnnnnnnnnnnnnnnnnnnnnnnnnnnnnnnnnnnnnnnnnnnnnnnnnnnnnnnnnnnnnnnnnnnnnnnnnnnnnnnnnnnnnnnnnnnnnnnnnnnnnnnnnnnnnnnnnnnnnnnnnnnnnnnnnnnnnnnnnnnnnnnnnnnnnnnnnnnnnnnnnnnnnnnnnnnnnnnnnnnnnnnnnnnnnnnnnnnnnnnnnnnnnnnnnnnnnnnnnnnnnnnnnnnnnnnnnnnnnnnnnnnnnnnnnnnnnnnnnnnnnnnnnnnnnnnnnnnnnnnnnnnnnnnnnnnnnnnnnnnnnnnnnnnnnnnnnnnnnnnnnnnnnnnnnnnnnnnnnnnnnnnnnnnnnnnnnnnnnnnnnnnnnnnnnnnnnnnnnnnnnnnnnnnnnnnnnnnnnnnnnnnnnnnnnnnnnnnnnnnnnnnnnnnnnnnnnnnnnnnnnnnnnnnnnnnnnnnnnnnnnnnnnnnnnnnnnnnnnnnnnnnnnnnnnnnnnnnnnnnnnnnnnnnnnnnnnnnnnnnnnnnnnnnnnnnnnnnnnnnnnnnnnnnnnnnnnnnnnnnnnnnnnnnnnnnnnnnnnnnnnnnnnnnnnnnnnnnnnnnnnnnnnnnnnnnnnnnnnnnnnnnnnnnnnnnnnnnnnnnnnnnnnnnnnnnnnnnnnnnnnnnnnnnnnnnnnnnnnnnnnnnnnnnnnnnnnnnnnnnnnnnnnnnnnnnnnnnnnnnnnnnnnnnnnnnnnnnnnnnnnnnnnnnnnnnnnnnnnnnnnnnnnnnnnnnnnnnnnnnnnnnnnnnnnnnnnnnnnnnnnnnnnnnnnnnnnnnnnnnnnnnnnnnnnnnnnnnnnnnnnnnnnnnnnnnnnnnnnnnnnnnnnnnnnnnnnnnnnnnnnnnnnnnnnnnnnnnnnnnnnnnnnnnnnnnnnnnnnnnnnnnnnnnnnnnnnnnnnnnnnnnnnnnnnnnnnnnnnnnnnnnnnnnnnnnnnnnnnnnnnnnnnnnnnnnnnnnnnnnnnnnnnnnnnnnnnnnnnnnnnnnnnnnnnnnnnnnnnnnnnnnnnnnnnnnnnnnnnnnnnnnnnnnnnnnnnnnnnnnnnnnnnnnnnnnnnnnnnnnnnnnnnnnnnnnnnnnnnnnnnnnnnnnnnnnnnnnnnnnnnnnnnnnnnnnnnnnnnnnnnnnnnnnnnnnnnnnnnnnnnnnnnnnnnnnnnnnnnnnnnnnnnnnnnnnnnnnnnnnnnnnnnnnnnnnnnnnnnnnnnnnnnnnnnnnnnnnnnnnnnnnnnnnnnnnnnnnnnnnnnnnnnnnnnnnnnnnnnnnnnnnnnnnnnnnnnnnnnnnnnnnnnnnnnnnnnnnnnnnnnnnnnnnnnnnnnnnnnnnnnnnnnnnnnnnnnnnnnnnnnnnnnnnnnnnnnnnnnnnnnnnnnnnnnnnnnnnnnnnnnnnnnnnnnnnnnnnnnnnnnnnnnnnnnnnnnnnnnnnnnnnnnnnnnnnnnnnnnnnnnnnnnnnnnnnnnnnnnnnnnnnnnnnnnnnnnnnnnnnnnnnnnnnnnnnnnnnnnnnnnnnnnnnnnnnnnnnnnnnnnnnnnnnnnnnnnnnnnnnnnnnnnnnnnnnnnnnnnnnnnnnnnnnnnnnnnnnnnnnnnnnnnnnnnnnnnnnnnnnnnnnnnnnnnnnnnnnnnnnnnnnnnnnnnnnnnnnnnnnnnnnnnnnnnnnnnnnnnnnnnnnnnnnnnnnnnnnnnnnnnnnnnnnnnnnnnnnnnnnnnnnnnnnnnnnnnnnnnnnnnnnnnnnnnnnnnnnnnnnnnnnnnnnnnnnnnnnnnnnnnnnnnnnnnnnnnnnnnnnnnnnnnnnnnnnnnnnnnnnnnnnnnnnnnnnnnnnnnnnnnnnnnnnnnnnnnnnnnnnnnnnnnnnnnnnnnnnnnnnnnnnnnnnnnnnnnnnnnnnnnnnnnnnnnnnnnnnnnnnnnnnnnnnnnnnnnnnnnnnnnnnnnnnnnnnnnnnnnnnnnnnnnnnnnnnnnnnnnnnnnnnnnnnnnnnnnnnnnnnnnnnnnnnnnnnnnnnnnnnnnnnnnnnnnnnnnnnnnnnnnnnnnnnnnnnnnnnnnnnnnnnnnnnnnnnnnnnnnnnnnnnnnnnnnnnnnnnnnnnnnnnnnnnnnnnnnnnnnnnnnnnnnnnnnnnnnnnnnnnnnnnnnnnnnnnnnnnnnnnnnnnnnnnnnnnnnnnnnnnnnnnnnnnnnnnnnnnnnnnnnnnnnnnnnnnnnnnnnnnnnnnnnnnnnnnnnnnnnnnnnnnnnnnnnnnnnnnnnnnnnnnnnnnnnnnnnnnnnnnnnnnnnnnnnnnnnnnnnnnnnnnnnnnnnnnnnnnnnnnnnnnnnnnnnnnnnnnnnnnnnnnnnnnnnnnnnnnnnnnnnnnnnnnnnnnnnnnnnnnnnnnnnnnnnnnnnnnnnnnnnnnnnnnnnnnnnnnnnnnnnnnnnnnnnnnnnnnnnnnnnnnnnnnnnnnnnnnnnnnnnnnnnnnnnnnnnnnnnnnnnnnnnnnnnnnnnnnnnnnnnnnnnnnnnnnnnnnnnnnnnnnnnnnnnnnnnnnnnnnnnnnnnnnnnnnnnnnnnnnnnnnnnnnnnnnnnnnnnnnnnnnnnnnnnnnnnnnnnnnnnnnnnnnnnnnnnnnnnnnnnnnnnnnnnnnnnnnnnnnnnnnnnnnnnnnnnnnnnnnnnnnnnnnnnnnnnnnnnnnnnnnnnnnnnnnnnnnnnnnnnnnnnnnnnnnnnnnnnnnnnnnnnnnnnnnnnnnnnnnnnnnnnnnnnnnnnnnnnnnnnnnnnnnnnnnnnnnnnnnnnnnnnnnnnnnnnnnnnnnnnnnnnnnnnnnnnnnnnnnnnnnnnnnnnnnnnnnnnnnnnnnnnnnnnnnnnnnnnnnnnnnnnnnnnnnnnnnnnnnnnnnnnnnnnnnnnnnnnnnnnnnnnnnnnnnnnnnnnnnnnnnnnnnnnnnnnnnnnnnnnnnnnnnnnnnnnnnnnnnnnnnnnnnnnnnnnnnnnnnnnnnnnnnnnnnnnnnnnnnnnnnnnnnnnnnnnnnnnnnnnnnnnnnnnnnnnnnnnnnnnnnnnnnnnnnnnnnnnnnnnnnnnnnnnnnnnnnnnnnnnnnnnnnnnnnnnnnnnnnnnnnnnnnnnnnnnnnnnnnnnnnnnnnnnnnnnnnnnnnnnnnnnnnnnnnnnnnnnnnnnnnnnnnnnnnnnnnnnnnnnnnnnnnnnnnnnnnnnnnnnnnnnnnnnnnnnnnnnnnnnnnnnnnnnnnnnnnnnnnnnnnnnnnnnnnnnnnnnnnnnnnnnnnnnnnnnnnnnnnnnnnnnnnnnnnnnnnnnnnnnnnnnnnnnnnnnnnnnnnnnnnnnnnnnnnnnnnnnnnnnnnnnnnnnnnnnnnnnnnnnnnnnnnnnnnnnnnnnnnnnnnnnnnnnnnnnnnnnnnnnnnnnnnnnnnnnnnnnnnnnnnnnnnnnnnnnnnnnnnnnnnnnnnnnnnnnnnnnnnnnnnnnnnnnnnnnnnnnnnnnnnnnnnnnnnnnnnnnnnnnnnnnnnnnnnnnnnnnnnnnnnnnnnnnnnnnnnnnnnnnnnnnnnnnnnnnnnnnnnnnnnnnnnnnnnnnnnnnnnnnnnnnnnnnnnnnnnnnnnnnnnnnnnnnnnnnnnnnnnnnnnnnnnnnnnnnnnnnnnnnnnnnnnnnnnnnnnnnnnnnnnnnnnnnnnnnnnnnnnnnnnnnnnnnnnnnnnnnnnnnnnnnnnnnnnnnnnnnnnnnnnnnnnnnnnnnnnnnnnnnnnnnnnnnnnnnnnnnnnnnnnnnnnnnnnnnnnnnnnnnnnnnnnnnnnnnnnnnnnnnnnnnnnnnnnnnnnnnnnnnnnnnnnnnnnnnnnnnnnnnnnnnnnnnnnnnnnnnnnnnnnnnnnnnnnnnnnnnnnnnnnnnnnnnnnnnnnnnnnnnnnnnnnnnnnnnnnnnnnnnnnnnnnnnnnnnnnnnnnnnnnnnnnnnnnnnnnnnnnnnnnnnnnnnnnnnnnnnnnnnnnnnnnnnnnnnnnnnnnnnnnnnnnnnnnnnnnnnnnnnnnnnnnnnnnnnnnnnnnnnnnnnnnnnnnnnnnnnnnnnnnnnnnnnnnnnnnnnnnnnnnnnnnnnnnnnnnnnnnnnnnnnnnnnnnnnnnnnnnnnnnnnnnnnnnnnnnnnnnnnnnnnnnnnnnnnnnnnnnnnnnnnnnnnnnnnnnnnnnnnnnnnnnnnnnnnnnnnnnnnnnnnnnnnnnnnnnnnnnnnnnnnnnnnnnnnnnnnnnnnnnnnnnnnnnnnnnnnnnnnnnnnnnnnnnnnnnnnnnnnnnnnnnnnnnnnnnnnnnnnnnnnnnnnnnnnnnnnnnnnnnnnnnnnnnnnnnnnnnnnnnnnnnnnnnnnnnnnnnnnnnnnnnnnnnnnnnnnnnnnnnnnnnnnnnnnnnnnnnnnnnnnnnnnnnnnnnnnnnnnnnnnnnnnnnnnnnnnnnnnnnnnnnnnnnnnnnnnnnnnnnnnnnnnnnnnnnnnnnnnnnnnnnnnnnnnnnnnnnnnnnnnnnnnnnnnnnnnnnnnnnnnnnnnnnnnnnnnnnnnnnnnnnnnnnnnnnnnnnnnnnnnnnnnnnnnnnnnnnnnnnnnnnnnnnnnnnnnnnnnnnnnnnnnnnnnnnnnnnnnnnnnnnnnnnnnnnnnnnnnnnnnnnnnnnnnnnnnnnnnnnnnnnnnnnnnnnnnnnnnnnnnnnnnnnnnnnnnnnnnnnnnnnnnnnnnnnnnnnnnnnnnnnnnnnnnnnnnnnnnnnnnnnnnnnnnnnnnnnnnnnnnnnnnnnnnnnnnnnnnnnnnnnnnnnnnnnnnnnnnnnnnnnnnnnnnnnnnnnnnnnnnnnnnnnnnnnnnnnnnnnnnnnnnnnnnnnnnnnnnnnnnnnnnnnnnnnnnnnnnnnnnnnnnnnnnnnnnnnnnnnnnnnnnnnnnnnnnnnnnnnnnnnnnnnnnnnnnnnnnnnnnnnnnnnnnnnnnnnnnnnnnnnnnnnnnnnnnnnnnnnnnnnnnnnnnnnnnnnnnnnnnnnnnnnnnnnnnnnnnnnnnnnnnnnnnnnnnnnnnnnnnnnnnnnnnnnnnnnnnnnnnnnnnnnnnnnnnnnnnnnnnnnnnnnnnnnnnnnnnnnnnnnnnnnnnnnnnnnnnnnnnnnnnnnnnnnnnnnnnnnnnnnnnnnnnnnnnnnnnnnnnnnnnnnnnnnnnnnnnnnnnnnnnnnnnnnnnnnnnnnnnnnnnnnnnnnnnnnnnnnnnnnnnnnnnnnnnnnnnnnnnnnnnnnnnnnnnnnnnnnnnnnnnnnnnnnnnnnnnnnnnnnnnnnnnnnnnnnnnnnnnnnnnnnnnnnnnnnnnnnnnnnnnnnnnnnnnnnnnnnnnnnnnnnnnnnnnnnnnnnnnnnnnnnnnnnnnnnnnnnnnnnnnnnnnnnnnnnnnnnnnnnnnnnnnnnnnnnnnnnnnnnnnnnnnnnnnnnnnnnnnnnnnnnnnnnnnnnnnnnnnnnnnnnnnnnnnnnnnnnnnnnnnnnnnnnnnnnnnnnnnnnnnnnnnnnnnnnnnnnnnnnnnnnnnnnnnnnnnnnnnnnnnnnnnnnnnnnnnnnnnnnnnnnnnnnnnnnnnnnnnnnnnnnnnnnnnnnnnnnnnnnnnnnnnnnnnnnnnnnnnnnnnnnnnnnnnnnnnnnnnnnnnnnnnnnnnnnnnnnnnnnnnnnnnnnnnnnnnnnnnnnnnnnnnnnnnnnnnnnnnnnnnnnnnnnnnnnnnnnnnnnnnnnnnnnnnnnnnnnnnnnnnnnnnnnnnnnnnnnnnnnnnnnnnnnnnnnnnnnnnnnnnnnnnnnnnnnnnnnnnnnnnnnnnnnnnnnnnnnnnnnnnnnnnnnnnnnnnnnnnnnnnnnnnnnnnnnnnnnnnnnnnnnnnnnnnnnnnnnnnnnnnnnnnnnnnnnnnnnnnnnnnnnnnnnnnnnnnnnnnnnnnnnnnnnnnnnnnnnnnnnnnnnnnnnnnnnnnnnnnnnnnnnnnnnnnnnnnnnnnnnnnnnnnnnnnnnnnnnnnnnnnnnnnnnnnnnnnnnnnnnnnnnnnnnnnnnnnnnnnnnnnnnnnnnnnnnnnnnnnnnnnnnnnnnnnnnnnnnnnnnnnnnnnnnnnnnnnnnnnnnnnnnnnnnnnnnnnnnnnnnnnnnnnnnnnnnnnnnnnnnnnnnnnnnnnnnnnnnnnnnnnnnnnnnnnnnnnnnnnnnnnnnnnnnnnnnnnnnnnnnnnnnnnnnnnnnnnnnnnnnnnnnnnnnnnnnnnnnnnnnnnnnnnnnnnnnnnnnnnnnnnnnnnnnnnnnnnnnnnnnnnnnnnnnnnnnnnnnnnnnnnnnnnnnnnnnnnnnnnnnnnnnnnnnnnnnnnnnnnnnnnnnnnnnnnnnnnnnnnnnnnnnnnnnnnnnnnnnnnnnnnnnnnnnnnnnnnnnnnnnnnnnnnnnnnnnnnnnnnnnnnnnnnnnnnnnnnnnnnnnnnnnnnnnnnnnnnnnnnnnnnnnnnnnnnnnnnnnnnnnnnnnnnnnnnnnnnnnnnnnnnnnnnnnnnnnnnnnnnnnnnnnnnnnnnnnnnnnnnnnnnnnnnnnnnnnnnnnnnnnnnnnnnnnnnnnnnnnnnnnnnnnnnnnnnnnnnnnnnnnnnnnnnnnnnnnnnnnnnnnnnnnnnnnnnnnnnnnnnnnnnnnnnnnnnnnnnnnnnnnnnnnnnnnnnnnnnnnnnnnnnnnnnnnnnnnnnnnnnnnnnnnnnnnnnnnnnnnnnnnnnnnnnnnnnnnnnnnnnnnnnnnnnnnnnnnnnnnnnnnnnnnnnnnnnnnnnnnnnnnnnnnnnnnnnnnnnnnnnnnnnnnnnnnnnnnnnnnnnnnnnnnnnnnnnnnnnnnnnnnnnnnnnnnnnnnnnnnnnnnnnnnnnnnnnnnnnnnnnnnnnnnnnnnnnnnnnnnnnnnnnnnnnnnnnnnnnnnnnnnnnnnnnnnnnnnnnnnnnnnnnnnnnnnnnnnnnnnnnnnnnnnnnnnnnnnnnnnnnnnnnnnnnnnnnnnnnnnnnnnnnnnnnnnnnnnnnnnnnnnnnnnnnnnnnnnnnnnnnnnnnnnnnnnnnnnnnnnnnnnnnnnnnnnnnnnnnnnnnnnnnnnnnnnnnnnnnnnnnnnnnnnnnnnnnnnnnnnnnnnnnnnnnnnnnnnnnnnnnnnnnnnnnnnnnnnnnnnnnnnnnnnnnnnnnnnnnnnnnnnnnnnnnnnnnnnnnnnnnnnnnnnnnnnnnnnnnnnnnnnnnnnnnnnnnnnnnnnnnnnnnnnnnnnnnnnnnnnnnnnnnnnnnnnnnnnnnnnnnnnnnnnnnnnnnnnnnnnnnnnnnnnnnnnnnnnnnnnnnnnnnnnnnnnnnnnnnnnnnnnnnnnnnnnnnnnnnnnnnnnnnnnnnnnnnnnnnnnnnnnnnnnnnnnnnnnnnnnnnnnnnnnnnnnnnnnnnnnnnnnnnnnnnnnnnnnnnnnnnnnnnnnnnnnnnnnnnnnnnnnnnnnnnnnnnnnnnnnnnnnnnnnnnnnnnnnnnnnnnnnnnnnnnnnnnnnnnnnnnnnnnnnnnnnnnnnnnnnnnnnnnnnnnnnnnnnnnnnnnnnnnnnnnnnnnnnnnnnnnnnnnnnnnnnnnnnnnnnnnnnnnnnnnnnnnnnnnnnnnnnnnnnnnnnnnnnnnnnnnnnnnnnnnnnnnnnnnnnnnnnnnnnnnnnnnnnnnnnnnnnnnnnnnnnnnnnnnnnnnnnnnnnnnnnnnnnnnnnnnnnnnnnnnnnnnnnnnnnnnnnnnnnnnnnnnnnnnnnnnnnnnnnnnnnnnnnnnnnnnnnnnnnnnnnnnnnnnnnnnnnnnnnnnnnnnnnnnnnnnnnnnnnnnnnnnnnnnnnnnnnnnnnnnnnnnnnnnnnnnnnnnnnnnnnnnnnnnnnnnnnnnnnnnnnnnnnnnnnnnnnnnnnnnnnnnnnnnnnnnnnnnnnnnnnnnnnnnnnnnnnnnnnnnnnnnnnnnnnnnnnnnnnnnnnnnnnnnnnnnnnnnnnnnnnnnnnnnnnnnnnnnnnnnnnnnnnnnnnnnnnnnnnnnnnnnnnnnnnnnnnnnnnnnnnnnnnnnnnnnnnnnnnnnnnnnnnnnnnnnnnnnnnnnnnnnnnnnnnnnnnnnnnnnnnnnnnnnnnnnnnnnnnnnnnnnnnnnnnnnnnnnnnnnnnnnnnnnnnnnnnnnnnnnnnnnnnnnnnnnnnnnnnnnnnnnnnnnnnnnnnnnnnnnnnnnnnnnnnnnnnnnnnnnnnnnnnnnnnnnnnnnnnnnnnnnnnnnnnnnnnnnnnnnnnnnnnnnnnnnnnnnnnnnnnnnnnnnnnnnnnnnnnnnnnnnnnnnnnnnnnnnnnnnnnnnnnnnnnnnnnnnnnnnnnnnnnnnnnnnnnnnnnnnnnnnnnnnnnnnnnnnnnnnnnnnnnnnnnnnnnnnnnnnnnnnnnnnnnnnnnnnnnnnnnnnnnnnnnnnnnnnnnnnnnnnnnnnnnnnnnnnnnnnnnnnnnnnnnnnnnnnnnnnnnnnnnnnnnnnnnnnnnnnnnnnnnnnnnnnnnnnnnnnnnnnnnnnnnnnnnnnnnnnnnnnnnnnnnnnnnnnnnnnnnnnnnnnnnnnnnnnnnnnnnnnnnnnnnnnnnnnnnnnnnnnnnnnnnnnnnnnnnnnnnnnnnnnnnnnnnnnnnnnnnnnnnnnnnnnnnnnnnnnnnnnnnnnnnnnnnnnnnnnnnnnnnnnnnnnnnnnnnnnnnnnnnnnnnnnnnnnnnnnnnnnnnnnnnnnnnnnnnnnnnnnnnnnnnnnnnnnnnnnnnnnnnnnnnnnnnnnnnnnnnnnnnnnnnnnnnnnnnnnnnnnnnnnnnnnnnnnnnnnnnnnnnnnnnnnnnnnnnnnnnnnnnnnnnnnnnnnnnnnnnnnnnnnnnnnnnnnnnnnnnnnnnnnnnnnnnnnnnnnnnnnnnnnnnnnnnnnnnnnnnnnnnnnnnnnnnnnnnnnnnnnnnnnnnnnnnnnnnnnnnnnnnnnnnnnnnnnnnnnnnnnnnnnnnnnnnnnnnnnnnnnnnnnnnnnnnnnnnnnnnnnnnnnnnnnnnnnnnnnnnnnnnnnnnnnnnnnnnnnnnnnnnnnnnnnnnnnnnnnnnnnnnnnnnnnnnnnnnnnnnnnnnnnnnnnnnnnnnnnnnnnnnnnnnnnnnnnnnnnnnnnnnnnnnnnnnnnnnnnnnnnnnnnnnnnnnnnnnnnnnnnnnnnnnnnnnnnnnnnnnnnnnnnnnnnnnnnnnnnnnnnnnnnnnnnnnnnnnnnnnnnnnnnnnnnnnnnnnnnnnnnnnnnnnnnnnnnnnnnnnnnnnnnnnnnnnnnnnnnnnnnnnnnnnnnnnnnnnnnnnnnnnnnnnnnnnnnnnnnnnnnnnnnnnnnnnnnnnnnnnnnnnnnnnnnnnnnnnnnnnnnnnnnnnnnnnnnnnnnnnnnnnnnnnnnnnnnnnnnnnnnnnnnnnnnnnnnnnnnnnnnnnnnnnnnnnnnnnnnnnnnnnnnnnnnnnnnnnnnnnnnnnnnnnnnnnnnnnnnnnnnnnnnnnnnnnnnnnnnnnnnnnnnnnnnnnnnnnnnnnnnnnnnnnnnnnnnnnnnnnnnnnnnnnnnnnnnnnnnnnnnnnnnnnnnnnnnnnnnnnnnnnnnnnnnnnnnnnnnnnnnnnnnnnnnnnnnnnnnnnnnnnnnnnnnnnnnnnnnnnnnnnnnnnnnnnnnnnnnnnnnnnnnnnnnnnnnnnnnnnnnnnnnnnnnnnnnnnnnnnnnnnnnnnnnnnnnnnnnnnnnnnnnnnnnnnnnnnnnnnnnnnnnnnnnnnnnnnnnnnnnnnnnnnnnnnnnnnnnnnnnnnnnnnnnnnnnnnnnnnnnnnnnnnnnnnnnnnnnnnnnnnnnnnnnnnnnnnnnnnnnnnnnnnnnnnnnnnnnnnnnnnnnnnnnnnnnnnnnnnnnnnnnnnnnnnnnnnnnnnnnnnnnnnnnnnnnnnnnnnnnnnnnnnnnnnnnnnnnnnnnnnnnnnnnnnnnnnnnnnnnnnnnnnnnnnnnnnnnnnnnnnnnnnnnnnnnnnnnnnnnnnnnnnnnnnnnnnnnnnnnnnnnnnnnnnnnnnnnnnnnnnnnnnnnnnnnnnnnnnnnnnnnnnnnnnnnnnnnnnnnnnnnnnnnnnnnnnnnnnnnnnnnnnnnnnnnnnnnnnnnnnnnnnnnnnnnnnnnnnnnnnnnnnnnnnnnnnnnnnnnnnnnnnnnnnnnnnnnnnnnnnnnnnnnnnnnnnnnnnnnnnnnnnnnnnnnnnnnnnnnnnnnnnnnnnnnnnnnnnnnnnnnnnnnnnnnnnnnnnnnnnnnnnnnnnnnnnnnnnnnnnnnnnnnnnnnnnnnnnnnnnnnnnnnnnnnnnnnnnnnnnnnnnnnnnnnnnnnnnnnnnnnnnnnnnnnnnnnnnnnnnnnnnnnnnnnnnnnnnnnnnnnnnnnnnnnnnnnnnnnnnnnnnnnnnnnnnnnnnnnnnnnnnnnnnnnnnnnnnnnnnnnnnnnnnnnnnnnnnnnnnnnnnnnnnnnnnnnnnnnnnnnnnnnnnnnnnnnnnnnnnnnnnnnnnnnnnnnnnnnnnnnnnnnnnnnnnnnnnnnnnnnnnnnnnnnnnnnnnnnnnnnnnnnnnnnnnnnnnnnnnnnnnnnnnnnnnnnnnnnnnnnnnnnnnnnnnnnnnnnnnnnnnnnnnnnnnnnnnnnnnnnnnnnnnnnnnnnnnnnnnnnnnnnnnnnnnnnnnnnnnnnnnnnnnnnnnnnnnnnnnnnnnnnnnnnnnnnnnnnnnnnnnnnnnnnnnnnnnnnnnnnnnnnnnnnnnnnnnnnnnnnnnnnnnnnnnnnnnnnnnnnnnnnnnnnnnnnnnnnnnnnnnnnnnnnnnnnnnnnnnnnnnnnnnnnnnnnnnnnnnnnnnnnnnnnnnnnnnnnnnnnnnnnnnnnnnnnnnnnnnnnnnnnnnnnnnnnnnnnnnnnnnnnnnnnnnnnnnnnnnnnnnnnnnnnnnnnnnnnnnnnnnnnnnnnnnnnnnnnnnnnnnnnnnnnnnnnnnnnnnnnnnnnnnnnnnnnnnnnnnnnnnnnnnnnnnnnnnnnnnnnnnnnnnnnnnnnnnnnnnnnnnnnnnnnnnnnnnnnnnnnnnnnnnnnnnnnnnnnnnnnnnnnnnnnnnnnnnnnnnnnnnnnnnnnnnnnnnnnnnnnnnnnnnnnnnnnnnnnnnnnnnnnnnnnnnnnnnnnnnnnnnnnnnnnnnnnnnnnnnnnnnnnnnnnnnnnnnnnnnnnnnnnnnnnnnnnnnnnnnnnnnnnnnnnnnnnnnnnnnnnnnnnnnnnnnnnnnnnnnnnnnnnnnnnnnnnnnnnnnnnnnnnnnnnnnnnnnnnnnnnnnnnnnnnnnnnnnnnnnnnnnnnnnnnnnnnnnnnnnnnnnnnnnnnnnnnnnnnnnnnnnnnnnnnnnnnnnnnnnnnnnnnnnnnnnnnnnnnnnnnnnnnnnnnnnnnnnnnnnnnnnnnnnnnnnnnnnnnnnnnnnnnnnnnnnnnnnnnnnnnnnnnnnnnnnnnnnnnnnnnnnnnnnnnnnnnnnnnnnnnnnnnnnnnnnnnnnnnnnnnnnnnnnnnnnnnnnnnnnnnnnnnnnnnnnnnnnnnnnnnnnnnnnnnnnnnnnnnnnnnnnnnnnnnnnnnnnnnnnnnnnnnnnnnnnnnnnnnnnnnnnnnnnnnnnnnnnnnnnnnnnnnnnnnnnnnnnnnnnnnnnnnnnnnnnnnnnnnnnnnnnnnnnnnnnnnnnnnnnnnnnnnnnnnnnnnnnnnnnnnnnnnnnnnnnnnnnnnnnnnnnnnnnnnnnnnnnnnnnnnnnnnnnnnnnnnnnnnnnnnnnnnnnnnnnnnnnnnnnnnnnnnnnnnnnnnnnnnnnnnnnnnnnnnnnnnnnnnnnnnnnnnnnnnnnnnnnnnnnnnnnnnnnnnnnnnnnnnnnnnnnnnnnnnnnnnnnnnnnnnnnnnnnnnnnnnnnnnnnnnnnnnnnnnnnnnnnnnnnnnnnnnnnnnnnnnnnnnnnnnnnnnnnnnnnnnnnnnnnnnnnnnnnnnnnnnnnnnnnnnnnnnnnnnnnnnnnnnnnnnnnnnnnnnnnnnnnnnnnnnnnnnnnnnnnnnnnnnnnnnnnnnnnnnnnnnnnnnnnnnnnnnnnnnnnnnnnnnnnnnnnnnnnnnnnnnnnnnnnnnnnnnnnnnnnnnnnnnnnnnnnnnnnnnnnnnnnnnnnnnnnnnnnnnnnnnnnnnnnnnnnnnnnnnnnnnnnnnnnnnnnnnnnnnnnnnnnnnnnnnnnnnnnnnnnnnnnnnnnnnnnnnnnnnnnnnnnnnnnnnnnnnnnnnnnnnnnnnnnnnnnnnnnnnnnnnnnnnnnnnnnnnnnnnnnnnnnnnnnnnnnnnnnnnnnnnnnnnnnnnnnnnnnnnnnnnnnnnnnnnnnnnnnnnnnnnnnnnnnnnnnnnnnnnnnnnnnnnnnnnnnnnnnnnnnnnnnnnnnnnnnnnnnnnnnnnnnnnnnnnnnnnnnnnnnnnnnnnnnnnnnnnnnnnnnnnnnnnnnnnnnnnnnnnnnnnnnnnnnnnnnnnnnnnnnnnnnnnnnnnnnnnnnnnnnnnnnnnnnnnnnnnnnnnnnnnnnnnnnnnnnnnnnnnnnnnnnnnnnnnnnnnnnnnnnnnnnnnnnnnnnnnnnnnnnnnnnnnnnnnnnnnnnnnnnnnnnnnnnnnnnnnnnnnnnnnnnnnnnnnnnnnnnnnnnnnnnnnnnnnnnnnnnnnnnnnnnnnnnnnnnnnnnnnnnnnnnnnnnnnnnnnnnnnnnnnnnnnnnnnnnnnnnnnnnnnnnnnnnnnnnnnnnnnnnnnnnnnnnnnnnnnnnnnnnnnnnnnnnnnnnnnnnnnnnnnnnnnnnnnnnnnnnnnnnnnnnnnnnnnnnnnnnnnnnnnnnnnnnnnnnnnnnnnnnnnnnnnnnnnnnnnnnnnnnnnnnnnnnnnnnnnnnnnnnnnnnnnnnnnnnnnnnnnnnnnnnnnnnnnnnnnnnnnnnnnnnnnnnnnnnnnnnnnnnnnnnnnnnnnnnnnnnnnnnnnnnnnnnnnnnnnnnnnnnnnnnnnnnnnnnnnnnnnnnnnnnnnnnnnnnnnnnnnnnnnnnnnnnnnnnnnnnnnnnnnnnnnnnnnnnnnnnnnnnnnnnnnnnnnnnnnnnnnnnnnnnnnnnnnnnnnnnnnnnnnnnnnnnnnnnnnnnnnnnnnnnnnnnnnnnnnnnnnnnnnnnnnnnnnnnnnnnnnnnnnnnnnnnnnnnnnnnnnnnnnnnnnnnnnnnnnnnnnnnnnnnnnnnnnnnnnnnnnnnnnnnnnnnnnnnnnnnnnnnnnnnnnnnnnnnnnnnnnnnnnnnnnnnnnnnnnnnnnnnnnnnnnnnnnnnnnnnnnnnnnnnnnnnnnnnnnnnnnnnnnnnnnnnnnnnnnnnnnnnnnnnnnnnnnnnnnnnnnnnnnnnnnnnnnnnnnnnnnnnnnnnnnnnnnnnnnnnnnnnnnnnnnnnnnnnnnnnnnnnnnnnnnnnnnnnnnnnnnnnnnnnnnnnnnnnnnnnnnnnnnnnnnnnnnnnnnnnnnnnnnnnnnnnnnnnnnnnnnnnnnnnnnnnnnnnnnnnnnnnnnnnnnnnnnnnnnnnnnnnnnnnnnnnnnnnnnnnnnnnnnnnnnnnnnnnnnnnnnnnnnnnnnnnnnnnnnnnnnnnnnnnnnnnnnnnnnnnnnnnnnnnnnnnnnnnnnnnnnnnnnnnnnnnnnnnnnnnnnnnnnnnnnnnnnnnnnnnnnnnnnnnnnnnnnnnnnnnnnnnnnnnnnnnnnnnnnnnnnnnnnnnnnnnnnnnnnnnnnnnnnnnnnnnnnnnnnnnnnnnnnnnnnnnnnnnnnnnnnnnnnnnnnnnnnnnnnnnnnnnnnnnnnnnnnnnnnnnnnnnnnnnnnnnnnnnnnnnnnnnnnnnnnnnnnnnnnnnnnnnnnnnnnnnnnnnnnnnnnnnnnnnnnnnnnnnnnnnnnnnnnnnnnnnnnnnnnnnnnnnnnnnnnnnnnnnnnnnnnnnnnnnnnnnnnnnnnnnnnnnnnnnnnnnnnnnnnnnnnnnnnnnnnnnnnnnnnnnnnnnnnnnnnnnnnnnnnnnnnnnnnnnnnnnnnnnnnnnnnnnnnnnnnnnnnnnnnnnnnnnnnnnnnnnnnnnnnnnnnnnnnnnnnnnnnnnnnnnnnnnnnnnnnnnnnnnnnnnnnnnnnnnnnnnnnnnnnnnnnnnnnnnnnnnnnnnnnnnnnnnnnnnnnnnnnnnnnnnnnnnnnnnnnnnnnnnnnnnnnnnnnnnnnnnnnnnnnnnnnnnnnnnnnnnnnnnnnnnnnnnnnnnnnnnnnnnnnnnnnnnnnnnnnnnnnnnnnnnnnnnnnnnnnnnnnnnnnnnnnnnnnnnnnnnnnnnnnnnnnnnnnnnnnnnnnnnnnnnnnnnnnnnnnnnnnnnnnnnnnnnnnnnnnnnnnnnnnnnnnnnnnnnnnnnnnnnnnnnnnnnnnnnnnnnnnnnnnnnnnnnnnnnnnnnnnnnnnnnnnnnnnnnnnnnnnnnnnnnnnnnnnnnnnnnnnnnnnnnnnnnnnnnnnnnnnnnnnnnnnnnnnnnnnnnnnnnnnnnnnnnnnnnnnnnnnnnnnnnnnnnnnnnnnnnnnnnnnnnnnnnnnnnnnnnnnnnnnnnnnnnnnnnnnnnnnnnnnnnnnnnnnnnnnnnnnnnnnnnnnnnnnnnnnnnnnnnnnnnnnnnnnnnnnnnnnnnnnnnnnnnnnnnnnnnnnnnnnnnnnnnnnnnnnnnnnnnnnnnnnnnnnnnnnnnnnnnnnnnnnnnnnnnnnnnnnnnnnnnnnnnnnnnnnnnnnnnnnnnnnnnnnnnnnnnnnnnnnnnnnnnnnnnnnnnnnnnnnnnnnnnnnnnnnnnnnnnnnnnnnnnnnnnnnnnnnnnnnnnnnnnnnnnnnnnnnnnnnnnnnnnnnnnnnnnnnnnnnnnnnnnnnnnnnnnnnnnnnnnnnnnnnnnnnnnnnnnnnnnnnnnnnnnnnnnnnnnnnnnnnnnnnnnnnnnnnnnnnnnnnnnnnnnnnnnnnnnnnnnnnnnnnnnnnnnnnnnnnnnnnnnnnnnnnnnnnnnnnnnnnnnnnnnnnnnnnnnnnnnnnnnnnnnnnnnnnnnnnnnnnnnnnnnnnnnnnnnnnnnnnnnnnnnnnnnnnnnnnnnnnnnnnnnnnnnnnnnnnnnnnnnnnnnnnnnnnnnnnnnnnnnnnnnnnnnnnnnnnnnnnnnnnnnnnnnnnnnnnnnnnnnnnnnnnnnnnnnnnnnnnnnnnnnnnnnnnnnnnnnnnnnnnnnnnnnnnnnnnnnnnnnnnnnnnnnnnnnnnnnnnnnnnnnnnnnnnnnnnnnnnnnnnnnnnnnnnnnnnnnnnnnnnnnnnnnnnnnnnnnnnnnnnnnnnnnnnnnnnnnnnnnnnnnnnnnnnnnnnnnnnnnnnnnnnnnnnnnnnnnnnnnnnnnnnnnnnnnnnnnnnnnnnnnnnnnnnnnnnnnnnnnnnnnnnnnnnnnnnnnnnnnnnnnnnnnnnnnnnnnnnnnnnnnnnnnnnnnnnnnnnnnnnnnnnnnnnnnnnnnnnnnnnnnnnnnnnnnnnnnnnnnnnnnnnnnnnnnnnnnnnnnnnnnnnnnnnnnnnnnnnnnnnnnnnnnnnnnnnnnnnnnnnnnnnnnnnnnnnnnnnnnnnnnnnnnnnnnnnnnnnnnnnnnnnnnnnnnnnnnnnnnnnnnnnnnnnnnnnnnnnnnnnnnnnnnnnnnnnnnnnnnnnnnnnnnnnnnnnnnnnnnnnnnnnnnnnnnnnnnnnnnnnnnnnnnnnnnnnnnnnnnnnnnnnnnnnnnnnnnnnnnnnnnnnnnnnnnnnnnnnnnnnnnnnnnnnnnnnnnnnnnnnnnnnnnnnnnnnnnnnnnnnnnnnnnnnnnnnnnnnnnnnnnnnnnnnnnnnnnnnnnnnnnnnnnnnnnnnnnnnnnnnnnnnnnnnnnnnnnnnnnnnnnnnnnnnnnnnnnnnnnnnnnnnnnnnnnnnnnnnnnnnnnnnnnnnnnnnnnnnnnnnnnnnnnnnnnnnnnnnnnnnnnnnnnnnnnnnnnnnnnnnnnnnnnnnnnnnnnnnnnnnnnnnnnnnnnnnnnnnnnnnnnnnnnnnnnnnnnnnnnnnnnnnnnnnnnnnnnnnnnnnnnnnnnnnnnnnnnnnnnnnnnnnnnnnnnnnnnnnnnnnnnnnnnnnnnnnnnnnnnnnnnnnnnnnnnnnnnnnnnnnnnnnnnnnnnnnnnnnnnnnnnnnnnnnnnnnnnnnnnnnnnnnnnnnnnnnnnnnnnnnnnnnnnnnnnnnnnnnnnnnnnnnnnnnnnnnnnnnnnnnnnnnnnnnnnnnnnnnnnnnnnnnnnnnnnnnnnnnnnnnnnnnnnnnnnnnnnnnnnnnnnnnnnnnnnnnnnnnnnnnnnnnnnnnnnnnnnnnnnnnnnnnnnnnnnnnnnnnnnnnnnnnnnnnnnnnnnnnnnnnnnnnnnnnnnnnnnnnnnnnnnnnnnnnnnnnnnnnnnnnnnnnnnnnnnnnnnnnnnnnnnnnnnnnnnnnnnnnnnnnnnnnnnnnnnnnnnnnnnnnnnnnnnnnnnnnnnnnnnnnnnnnnnnnnnnnnnnnnnnnnnnnnnnnnnnnnnnnnnnnnnnnnnnnnnnnnnnnnnnnnnnnnnnnnnnnnnnnnnnnnnnnnnnnnnnnnnnnnnnnnnnnnnnnnnnnnnnnnnnnnnnnnnnnnnnnnnnnnnnnnnnnnnnnnnnnnnnnnnnnnnnnnnnnnnnnnnnnnnnnnnnnnnnnnnnnnnnnnnnnnnnnnnnnnnnnnnnnnnnnnnnnnnnnnnnnnnnnnnnnnnnnnnnnnnnnnnnnnnnnnnnnnnnnnnnnnnnnnnnnnnnnnnnnnnnnnnnnnnnnnnnnnnnnnnnnnnnnnnnnnnnnnnnnnnnnnnnnnnnnnnnnnnnnnnnnnnnnnnnnnnnnnnnnnnnnnnnnnnnnnnnnnnnnnnnnnnnnnnnnnnnnnnnnnnnnnnnnnnnnnnnnnnnnnnnnnnnnnnnnnnnnnnnnnnnnnnnnnnnnnnnnnnnnnnnnnnnnnnnnnnnnnnnnnnnnnnnnnnnnnnnnnnnnnnnnnnnnnnnnnnnnnnnnnnnnnnnnnnnnnnnnnnnnnnnnnnnnnnnnnnnnnnnnnnnnnnnnnnnnnnnnnnnnnnnnnnnnnnnnnnnnnnnnnnnnnnnnnnnnnnnnnnnnnnnnnnnnnnnnnnnnnnnnnnnnnnnnnnnnnnnnnnnnnnnnnnnnnnnnnnnnnnnnnnnnnnnnnnnnnnnnnnnnnnnnnnnnnnnnnnnnnnnnnnnnnnnnnnnnnnnnnnnnnnnnnnnnnnnnnnnnnnnnnnnnnnnnnnnnnnnnnnnnnnnnnnnnnnnnnnnnnnnnnnnnnnnnnnnnnnnnnnnnnnnnnnnnnnnnnnnnnnnnnnnnnnnnnnnnnnnnnnnnnnnnnnnnnnnnnnnnnnnnnnnnnnnnnnnnnnnnnnnnnnnnnnnnnnnnnnnnnnnnnnnnnnnnnnnnnnnnnnnnnnnnnnnnnnnnnnnnnnnnnnnnnnnnnnnnnnnnnnnnnnnnnnnnnnnnnnnnnnnnnnnnnnnnnnnnnnnnnnnnnnnnnnnnnnnnnnnnnnnnnnnnnnnnnnnnnnnnnnnnnnnnnnnnnnnnnnnnnnnnnnnnnnnnnnnnnnnnnnnnnnnnnnnnnnnnnnnnnnnnnnnnnnnnnnnnnnnnnnnnnnnnnnnnnnnnnnnnnnnnnnnnnnnnnnnnnnnnnnnnnnnnnnnnnnnnnnnnnnnnnnnnnnnnnnnnnnnnnnnnnnnnnnnnnnnnnnnnnnnnnnnnnnnnnnnnnnnnnnnnnnnnnnnnnnnnnnnnnnnnnnnnnnnnnnnnnnnnnnnnnnnnnnnnnnnnnnnnnnnnnnnnnnnnnnnnnnnnnnnnnnnnnnnnnnnnnnnnnnnnnnnnnnnnnnnnnnnnnnnnnnnnnnnnnnnnnnnnnnnnnnnnnnnnnnnnnnnnnnnnnnnnnnnnnnnnnnnnnnnnnnnnnnnnnnnnnnnnnnnnnnnnnnnnnnnnnnnnnnnnnnnnnnnnnnnnnnnnnnnnnnnnnnnnnnnnnnnnnnnnnnnnnnnnnnnnnnnnnnnnnnnnnnnnnnnnnnnnnnnnnnnnnnnnnnnnnnnnnnnnnnnnnnnnnnnnnnnnnnnnnnnnnnnnnnnnnnnnnnnnnnnnnnnnnnnnnnnnnnnnnnnnnnnnnnnnnnnnnnnnnnnnnnnnnnnnnnnnnnnnnnnnnnnnnnnnnnnnnnnnnnnnnnnnnnnnnnnnnnnnnnnnnnnnnnnnnnnnnnnnnnnnnnnnnnnnnnnnnnnnnnnnnnnnnnnnnnnnnnnnnnnnnnnnnnnnnnnnnnnnnnnnnnnnnnnnnnnnnnnnnnnnnnnnnnnnnnnnnnnnnnnnnnnnnnnnnnnnnnnnnnnnnnnnnnnnnnnnnnnnnnnnnnnnnnnnnnnnnnnnnnnnnnnnnnnnnnnnnnnnnnnnnnnnnnnnnnnnnnnnnnnnnnnnnnnnnnnnnnnnnnnnnnnnnnnnnnnnnnnnnnnnnnnnnnnnnnnnnnnnnnnnnnnnnnnnnnnnnnnnnnnnnnnnnnnnnnnnnnnnnnnnnnnnnnnnnnnnnnnnnnnnnnnnnnnnnnnnnnnnnnnnnnnnnnnnnnnnnnnnnnnnnnnnnnnnnnnnnnnnnnnnnnnnnnnnnnnnnnnnnnnnnnnnnnnnnnnnnnnnnnnnnnnnnnnnnnnnnnnnnnnnnnnnnnnnnnnnnnnnnnnnnnnnnnnnnnnnnnnnnnnnnnnnnnnnnnnnnnnnnnnnnnnnnnnnnnnnnnnnnnnnnnnnnnnnnnnnnnnnnnnnnnnnnnnnnnnnnnnnnnnnnnnnnnnnnnnnnnnnnnnnnnnnnnnnnnnnnnnnnnnnnnnnnnnnnnnnnnnnnnnnnnnnnnnnnnnnnnnnnnnnnnnnnnnnnnnnnnnnnnnnnnnnnnnnnnnnnnnnnnnnnnnnnnnnnnnnnnnnnnnnnnnnnnnnnnnnnnnnnnnnnnnnnnnnnnnnnnnnnnnnnnnnnnnnnnnnnnnnnnnnnnnnnnnnnnnnnnnnnnnnnnnnnnnnnnnnnnnnnnnnnnnnnnnnnnnnnnnnnnnnnnnnnnnnnnnnnnnnnnnnnnnnnnnnnnnnnnnnnnnnnnnnnnnnnnnnnnnnnnnnnnnnnnnnnnnnnnnnnnnnnnnnnnnnnnnnnnnnnnnnnnnnnnnnnnnnnnnnnnnnnnnnnnnnnnnnnnnnnnnnnnnnnnnnnnnnnnnnnnnnnnnnnnnnnnnnnnnnnnnnnnnnnnnnnnnnnnnnnnnnnnnnnnnnnnnnnnnnnnnnnnnnnnnnnnnnnnnnnnnnnnnnnnnnnnnnnnnnnnnnnnnnnnnnnnnnnnnnnnnnnnnnnnnnnnnnnnnnnnnnnnnnnnnnnnnnnnnnnnnnnnnnnnnnnnnnnnnnnnnnnnnnnnnnnnnnnnnnnnnnnnnnnnnnnnnnnnnnnnnnnnnnnnnnnnnnnnnnnnnnnnnnnnnnnnnnnnnnnnnnnnnnnnnnnnnnnnnnnnnnnnnnnnnnnnnnnnnnnnnnnnnnnnnnnnnnnnnnnnnnnnnnnnnnnnnnnnnnnnnnnnnnnnnnnnnnnnnnnnnnnnnnnnnnnnnnnnnnnnnnnnnnnnnnnnnnnnnnnnnnnnnnnnnnnnnnnnnnnnnnnnnnnnnnnnnnnnnnnnnnnnnnnnnnnnnnnnnnnnnnnnnnnnnnnnnnnnnnnnnnnnnnnnnnnnnnnnnnnnnnnnnnnnnnnnnnnnnnnnnnnnnnnnnnnnnnnnnnnnnnnnnnnnnnnnnnnnnnnnnnnnnnnnnnnnnnnnnnnnnnnnnnnnnnnnnnnnnnnnnnnnnnnnnnnnnnnnnnnnnnnnnnnnnnnnnnnnnnnnnnnnnnnnnnnnnnnnnnnnnnnnnnnnnnnnnnnnnnnnnnnnnnnnnnnnnnnnnnnnnnnnnnnnnnnnnnnnnnnnnnnnnnnnnnnnnnnnnnnnnnnnnnnnnnnnnnnnnnnnnnnnnnnnnnnnnnnnnnnnnnnnnnnnnnnnnnnnnnnnnnnnnnnnnnnnnnnnnnnnnnnnnnnnnnnnnnnnnnnnnnnnnnnnnnnnnnnnnnnnnnnnnnnnnnnnnnnnnnnnnnnnnnnnnnnnnnnnnnnnnnnnnnnnnnnnnnnnnnnnnnnnnnnnnnnnnnnnnnnnnnnnnnnnnnnnnnnnnnnnnnnnnnnnnnnnnnnnnnnnnnnnnnnnnnnnnnnnnnnnnnnnnnnnnnnnnnnnnnnnnnnnnnnnnnnnnnnnnnnnnnnnnnnnnnnnnnnnnnnnnnnnnnnnnnnnnnnnnnnnnnnnnnnnnnnnnnnnnnnnnnnnnnnnnnnnnnnnnnnnnnnnnnnnnnnnnnnnnnnnnnnnnnnnnnnnnnnnnnnnnnnnnnnnnnnnnnnnnnnnnnnnnnnnnnnnnnnnnnnnnnnnnnnnnnnnnnnnnnnnnnnnnnnnnnnnnnnnnnnnnnnnnnnnnnnnnnnnnnnnnnnnnnnnnnnnnnnnnnnnnnnnnnnnnnnnnnnnnnnnnnnnnnnnnnnnnnnnnnnnnnnnnnnnnnnnnnnnnnnnnnnnnnnnnnnnnnnnnnnnnnnnnnnnnnnnnnnnnnnnnnnnnnnnnnnnnnnnnnnnnnnnnnnnnnnnnnnnnnnnnnnnnnnnnnnnnnnnnnnnnnnnnnnnnnnnnnnnnnnnnnnnnnnnnnnnnnnnnnnnnnnnnnnnnnnnnnnnnnnnnnnnnnnnnnnnnnnnnnnnnnnnnnnnnnnnnnnnnnnnnnnnnnnnnnnnnnnnnnnnnnnnnnnnnnnnnnnnnnnnnnnnnnnnnnnnnnnnnnnnnnnnnnnnnnnnnnnnnnnnnnnnnnnnnnnnnnnnnnnnnnnnnnnnnnnnnnnnnnnnnnnnnnnnnnnnnnnnnnnnnnnnnnnnnnnnnnnnnnnnnnnnnnnnnnnnnnnnnnnnnnnnnnnnnnnnnnnnnnnnnnnnnnnnnnnnnnnnnnnnnnnnnnnnnnnnnnnnnnnnnnnnnnnnnnnnnnnnnnnnnnnnnnnnnnnnnnnnnnnnnnnnnnnnnnnnnnnnnnnnnnnnnnnnnnnnnnnnnnnnnnnnnnnnnnnnnnnnnnnnnnnnnnnnnnnnnnnnnnnnnnnnnnnnnnnnnnnnnnnnnnnnnnnnnnnnnnnnnnnnnnnnnnnnnnnnnnnnnnnnnnnnnnnnnnnnnnnnnnnnnnnnnnnnnnnnnnnnnnnnnnnnnnnnnnnnnnnnnnnnnnnnnnnnnnnnnnnnnnnnnnnnnnnnnnnnnnnnnnnnnnnnnnnnnnnnnnnnnnnnnnnnnnnnnnnnnnnnnnnnnnnnnnnnnnnnnnnnnnnnnnnnnnnnnnnnnnnnnnnnnnnnnnnnnnnnnnnnnnnnnnnnnnnnnnnnnnnnnnnnnnnnnnnnnnnnnnnnnnnnnnnnnnnnnnnnnnnnnnnnnnnnnnnnnnnnnnnnnnnnnnnnnnnnnnnnnnnnnnnnnnnnnnnnnnnnnnnnnnnnnnnnnnnnnnnnnnnnnnnnnnnnnnnnnnnnnnnnnnnnnnnnnnnnnnnnnnnnnnnnnnnnnnnnnnnnnnnnnnnnnnnnnnnnnnnnnnnnnnnnnnnnnnnnnnnnnnnnnnnnnnnnnnnnnnnnnnnnnnnnnnnnnnnnnnnnnnnnnnnnnnnnnnnnnnnnnnnnnnnnnnnnnnnnnnnnnnnnnnnnnnnnnnnnnnnnnnnnnnnnnnnnnnnnnnnnnnnnnnnnnnnnnnnnnnnnnnnnnnnnnnnnnnnnnnnnnnnnnnnnnnnnnnnnnnnnnnnnnnnnnnnnnnnnnnnnnnnnnnnnnnnnnnnnnnnnnnnnnnnnnnnnnnnnnnnnnnnnnnnnnnnnnnnnnnnnnnnnnnnnnnnnnnnnnnnnnnnnnnnnnnnnnnnnnnnnnnnnnnnnnnnnnnnnnnnnnnnnnnnnnnnnnnnnnnnnnnnnnnnnnnnnnnnnnnnnnnnnnnnnnnnnnnnnnnnnnnnnnnnnnnnnnnnnnnnnnnnnnnnnnnnnnnnnnnnnnnnnnnnnnnnnnnnnnnnnnnnnnnnnnnnnnnnnnnnnnnnnnnnnnnnnnnnnnnnnnnnnnnnnnnnnnnnnnnnnnnnnnnnnnnnnnnnnnnnnnnnnnnnnnnnnnnnnnnnnnnnnnnnnnnnnnnnnnnnnnnnnnnnnnnnnnnnnnnnnnnnnnnnnnnnnnnnnnnnnnnnnnnnnnnnnnnnnnnnnnnnnnnnnnnnnnnnnnnnnnnnnnnnnnnnnnnnnnnnnnnnnnnnnnnnnnnnnnnnnnnnnnnnnnnnnnnnnnnnnnnnnnnnnnnnnnnnnnnnnnnnnnnnnnnnnnnnnnnnnnnnnnnnnnnnnnnnnnnnnnnnnnnnnnnnnnnnnnnnnnnnnnnnnnnnnnnnnnnnnnnnnnnnnnnnnnnnnnnnnnnnnnnnnnnnnnnnnnnnnnnnnnnnnnnnnnnnnnnnnnnnnnnnnnnnnnnnnnnnnnnnnnnnnnnnnnnnnnnnnnnnnnnnnnnnnnnnnnnnnnnnnnnnnnnnnnnnnnnnnnnnnnnnnnnnnnnnnnnnnnnnnnnnnnnnnnnnnnnnnnnnnnnnnnnnnnnnnnnnnnnnnnnnnnnnnnnnnnnnnnnnnnnnnnnnnnnnnnnnnnnnnnnnnnnnnnnnnnnnnnnnnnnnnnnnnnnnnnnnnnnnnnnnnnnnnnnnnnnnnnnnnnnnnnnnnnnnnnnnnnnnnnnnnnnnnnnnnnnnnnnnnnnnnnnnnnnnnnnnnnnnnnnnnnnnnnnnnnnnnnnnnnnnnnnnnnnnnnnnnnnnnnnnnnnnnnnnnnnnnnnnnnnnnnnnnnnnnnnnnnnnnnnnnnnnnnnnnnnnnnnnnnnnnnnnnnnnnnnnnnnnnnnnnnnnnnnnnnnnnnnnnnnnnnnnnnnnnnnnnnnnnnnnnnnnnnnnnnnnnnnnnnnnnnnnnnnnnnnnnnnnnnnnnnnnnnnnnnnnnnnnnnnnnnnnnnnnnnnnnnnnnnnnnnnnnnnnnnnnnnnnnnnnnnnnnnnnnnnnnnnnnnnnnnnnnnnnnnnnnnnnnnnnnnnnnnnnnnnnnnnnnnnnnnnnnnnnnnnnnnnnnnnnnnnnnnnnnnnnnnnnnnnnnnnnnnnnnnnnnnnnnnnnnnnnnnnnnnnnnnnnnnnnnnnnnnnnnnnnnnnnnnnnnnnnnnnnnnnnnnnnnnnnnnnnnnnnnnnnnnnnnnnnnnnnnnnnnnnnnnnnnnnnnnnnnnnnnnnnnnnnnnnnnnnnnnnnnnnnnnnnnnnnnnnnnnnnnnnnnnnnnnnnnnnnnnnnnnnnnnnnnnnnnnnnnnnnnnnnnnnnnnnnnnnnnnnnnnnnnnnnnnnnnnnnnnnnnnnnnnnnnnnnnnnnnnnnnnnnnnnnnnnnnnnnnnnnnnnnnnnnnnnnnnnnnnnnnnnnnnnnnnnnnnnnnnnnnnnnnnnnnnnnnnnnnnnnnnnnnnnnnnnnnnnnnnnnnnnnnnnnnnnnnnnnnnnnnnnnnnnnnnnnnnnnnnnnnnnnnnnnnnnnnnnnnnnnnnnnnnnnnnnnnnnnnnnnnnnnnnnnnnnnnnnnnnnnnnnnnnnnnnnnnnnnnnnnnnnnnnnnnnnnnnnnnnnnnnnnnnnnnnnnnnnnnnnnnnnnnnnnnnnnnnnnnnnnnnnnnnnnnnnnnnnnnnnnnnnnnnnnnnnnnnnnnnnnnnnnnnnnnnnnnnnnnnnnnnnnnnnnnnnnnnnnnnnnnnnnnnnnnnnnnnnnnnnnnnnnnnnnnnnnnnnnnnnnnnnnnnnnnnnnnnnnnnnnnnnnnnnnnnnnnnnnnnnnnnnnnnnnnnnnnnnnnnnnnnnnnnnnnnnnnnnnnnnnnnnnnnnnnnnnnnnnnnnnnnnnnnnnnnnnnnnnnnnnnnnnnnnnnnnnnnnnnnnnnnnnnnnnnnnnnnnnnnnnnnnnnnnnnnnnnnnnnnnnnnnnnnnnnnnnnnnnnnnnnnnnnnnnnnnnnnnnnnnnnnnnnnnnnnnnnnnnnnnnnnnnnnnnnnnnnnnnnnnnnnnnnnnnnnnnnnnnnnnnnnnnnnnnnnnnnnnnnnnnnnnnnnnnnnnnnnnnnnnnnnnnnnnnnnnnnnnnnnnnnnnnnnnnnnnnnnnnnnnnnnnnnnnnnnnnnnnnnnnnnnnnnnnnnnnnnnnnnnnnnnnnnnnnnnnnnnnnnnnnnnnnnnnnnnnnnnnnnnnnnnnnnnnnnnnnnnnnnnnnnnnnnnnnnnnnnnnnnnnnnnnnnnnnnnnnnnnnnnnnnnnnnnnnnnnnnnnnnnnnnnnnnnnnnnnnnnnnnnnnnnnnnnnnnnnnnnnnnnnnnnnnnnnnnnnnnnnnnnnnnnnnnnnnnnnnnnnnnnnnnnnnnnnnnnnnnnnnnnnnnnnnnnnnnnnnnnnnnnnnnnnnnnnnnnnnnnnnnnnnnnnnnnnnnnnnnnnnnnnnnnnnnnnnnnnnnnnnnnnnnnnnnnnnnnnnnnnnnnnnnnnnnnnnnnnnnnnnnnnnnnnnnnnnnnnnnnnnnnnnnnnnnnnnnnnnnnnnnnnnnnnnnnnnnnnnnnnnnnnnnnnnnnnnnnnnnnnnnnnnnnnnnnnnnnnnnnnnnnnnnnnnnnnnnnnnnnnnnnnnnnnnnnnnnnnnnnnnnnnnnnnnnnnnnnnnnnnnnnnnnnnnnnnnnnnnnnnnnnnnnnnnnnnnnnnnnnnnnnnnnnnnnnnnnnnnnnnnnnnnnnnnnnnnnnnnnnnnnnnnnnnnnnnnnnnnnnnnnnnnnnnnnnnnnnnnnnnnnnnnnnnnnnnnnnnnnnnnnnnnnnnnnnnnnnnnnnnnnnnnnnnnnnnnnnnnnnnnnnnnnnnnnnnnnnnnnnnnnnnnnnnnnnnnnnnnnnnnnnnnnnnnnnnnnnnnnnnnnnnnnnnnnnnnnnnnnnnnnnnnnnnnnnnnnnnnnnnnnnnnnnnnnnnnnnnnnnnnnnnnnnnnnnnnnnnnnnnnnnnnnnnnnnnnnnnnnnnnnnnnnnnnnnnnnnnnnnnnnnnnnnnnnnnnnnnnnnnnnnnnnnnnnnnnnnnnnnnnnnnnnnnnnnnnnnnnnnnnnnnnnnnnnnnnnnnnnnnnnnnnnnnnnnnnnnnnnnnnnnnnnnnnnnnnnnnnnnnnnnnnnnnnnnnnnnnnnnnnnnnnnnnnnnnnnnnnnnnnnnnnnnnnnnnnnnnnnnnnnnnnnnnnnnnnnnnnnnnnnnnnnnnnnnnnnnnnnnnnnnnnnnnnnnnnnnnnnnnnnnnnnnnnnnnnnnnnnnnnnnnnnnnnnnnnnnnnnnnnnnnnnnnnnnnnnnnnnnnnnnnnnnnnnnnnnnnnnnnnnnnnnnnnnnnnnnnnnnnnnnnnnnnnnnnnnnnnnnnnnnnnnnnnnnnnnnnnnnnnnnnnnnnnnnnnnnnnnnnnnnnnnnnnnnnnnnnnnnnnnnnnnnnnnnnnnnnnnnnnnnnnnnnnnnnnnnnnnnnnnnnnnnnnnnnnnnnnnnnnnnnnnnnnnnnnnnnnnnnnnnnnnnnnnnnnnnnnnnnnnnnnnnnnnnnnnnnnnnnnnnnnnnnnnnnnnnnnnnnnnnnnnnnnnnnnnnnnnnnnnnnnnnnnnnnnnnnnnnnnnnnnnnnnnnnnnnnnnnnnnnnnnnnnnnnnnnnnnnnnnnnnnnnnnnnnnnnnnnnnnnnnnnnnnnnnnnnnnnnnnnnnnnnnnnnnnnnnnnnnnnnnnnnnnnnnnnnnnnnnnnnnnnnnnnnnnnnnnnnnnnnnnnnnnnnnnnnnnnnnnnnnnnnnnnnnnnnnnnnnnnnnnnnnnnnnnnnnnnnnnnnnnnnnnnnnnnnnnnnnnnnnnnnnnnnnnnnnnnnnnnnnnnnnnnnnnnnnnnnnnnnnnnnnnnnnnnnnnnnnnnnnnnnnnnnnnnnnnnnnnnnnnnnnnnnnnnnnnnnnnnnnnnnnnnnnnnnnnnnnnnnnnnnnnnnnnnnnnnnnnnnnnnnnnnnnnnnnnnnnnnnnnnnnnnnnnnnnnnnnnnnnnnnnnnnnnnnnnnnnnnnnnnnnnnnnnnnnnnnnnnnnnnnnnnnnnnnnnnnnnnnnnnnnnnnnnnnnnnnnnnnnnnnnnnnnnnnnnnnnnnnnnnnnnnnnnnnnnnnnnnnnnnnnnnnnnnnnnnnnnnnnnnnnnnnnnnnnnnnnnnnnnnnnnnnnnnnnnnnnnnnnnnnnnnnnnnnnnnnnnnnnnnnnnnnnnnnnnnnnnnnnnnnnnnnnnnnnnnnnnnnnnnnnnnnnnnnnnnnnnnnnnnnnnnnnnnnnnnnnnnnnnnnnnnnnnnnnnnnnnnnnnnnnnnnnnnnnnnnnnnnnnnnnnnnnnnnnnnnnnnnnnnnnnnnnnnnnnnnnnnnnnnnnnnnnnnnnnnnnnnnnnnnnnnnnnnnnnnnnnnnnnnnnnnnnnnnnnnnnnnnnnnnnnnnnnnnnnnnnnnnnnnnnnnnnnnnnnnnnnnnnnnnnnnnnnnnnnnnnnnnnnnnnnnnnnnnnnnnnnnnnnnnnnnnnnnnnnnnnnnnnnnnnnnnnnnnnnnnnnnnnnnnnnnnnnnnnnnnnnnnnnnnnnnnnnnnnnnnnnnnnnnnnnnnnnnnnnnnnnnnnnnnnnnnnnnnnnnnnnnnnnnnnnnnnnnnnnnnnnnnnnnnnnnnnnnnnnnnnnnnnnnnnnnnnnnnnnnnnnnnnnnnnnnnnnnnnnnnnnnnnnnnnnnnnnnnnnnnnnnnnnnnnnnnnnnnnnnnnnnnnnnnnnnnnnnnnnnnnnnnnnnnnnnnnnnnnnnnnnnnnnnnnnnnnnnnnnnnnnnnnnnnnnnnnnnnnnnnnnnnnnnnnnnnnnnnnnnnnnnnnnnnnnnnnnnnnnnnnnnnnnnnnnnnnnnnnnnnnnnnnnnnnnnnnnnnnnnnnnnnnnnnnnnnnnnnnnnnnnnnnnnnnnnnnnnnnnnnnnnnnnnnnnnnnnnnnnnnnnnnnnnnnnnnnnnnnnnnnnnnnnnnnnnnnnnnnnnnnnnnnnnnnnnnnnnnnnnnnnnnnnnnnnnnnnnnnnnnnnnnnnnnnnnnnnnnnnnnnnnnnnnnnnnnnnnnnnnnnnnnnnnnnnnnnnnnnnnnnnnnnnnnnnnnnnnnnnnnnnnnnnnnnnnnnnnnnnnnnnnnnnnnnnnnnnnnnnnnnnnnnnnnnnnnnnnnnnnnnnnnnnnnnnnnnnnnnnnnnnnnnnnnnnnnnnnnnnnnnnnnnnnnnnnnnnnnnnnnnnnnnnnnnnnnnnnnnnnnnnnnnnnnnnnnnnnnnnnnnnnnnnnnnnnnnnnnnnnnnnnnnnnnnnnnnnnnnnnnnnnnnnnnnnnnnnnnnnnnnnnnnnnnnnnnnnnnnnnnnnnnnnnnnnnnnnnnnnnnnnnnnnnnnnnnnnnnnnnnnnnnnnnnnnnnnnnnnnnnnnnnnnnnnnnnnnnnnnnnnnnnnnnnnnnnnnnnnnnnnnnnnnnnnnnnnnnnnnnnnnnnnnnnnnnnnnnnnnnnnnnnnnnnnnnnnnnnnnnnnnnnnnnnnnnnnnnnnnnnnnnnnnnnnnnnnnnnnnnnnnnnnnnnnnnnnnnnnnnnnnnnnnnnnnnnnnnnnnnnnnnnnnnnnnnnnnnnnnnnnnnnnnnnnnnnnnnnnnnnnnnnnnnnnnnnnnnnnnnnnnnnnnnnnnnnnnnnnnnnnnnnnnnnnnnnnnnnnnnnnnnnnnnnnnnnnnnnnnnnnnnnnnnnnnnnnnnnnnnnnnnnnnnnnnnnnnnnnnnnnnnnnnnnnnnnnnnnnnnnnnnnnnnnnnnnnnnnnnnnnnnnnnnnnnnnnnnnnnnnnnnnnnnnnnnnnnnnnnnnnnnnnnnnnnnnnnnnnnnnnnnnnnnnnnnnnnnnnnnnnnnnnnnnnnnnnnnnnnnnnnnnnnnnnnnnnnnnnnnnnnnnnnnnnnnnnnnnnnnnnnnnnnnnnnnnnnnnnnnnnnnnnnnnnnnnnnnnnnnnnnnnnnnnnnnnnnnnnnnnnnnnnnnnnnnnnnnnnnnnnnnnnnnnnnnnnnnnnnnnnnnnnnnnnnnnnnnnnnnnnnnnnnnnnnnnnnnnnnnnnnnnnnnnnnnnnnnnnnnnnnnnnnnnnnnnnnnnnnnnnnnnnnnnnnnnnnnnnnnnnnnnnnnnnnnnnnnnnnnnnnnnnnnnnnnnnnnnnnnnnnnnnnnnnnnnnnnnnnnnnnnnnnnnnnnnnnnnnnnnnnnnnnnnnnnnnnnnnnnnnnnnnnnnnnnnnnnnnnnnnnnnnnnnnnnnnnnnnnnnnnnnnnnnnnnnnnnnnnnnnnnnnnnnnnnnnnnnnnnnnnnnnnnnnnnnnnnnnnnnnnnnnnnnnnnnnnnnnnnnnnnnnnnnnnnnnnnnnnnnnnnnnnnnnnnnnnnnnnnnnnnnnnnnnnnnnnnnnnnnnnnnnnnnnnnnnnnnnnnnnnnnnnnnnnnnnnnnnnnnnnnnnnnnnnnnnnnnnnnnnnnnnnnnnnnnnnnnnnnnnnnnnnnnnnnnnnnnnnnnnnnnnnnnnnnnnnnnnnnnnnnnnnnnnnnnnnnnnnnnnnnnnnnnnnnnnnnnnnnnnnnnnnnnnnnnnnnnnnnnnnnnnnnnnnnnnnnnnnnnnnnnnnnnnnnnnnnnnnnnnnnnnnnnnnnnnnnnnnnnnnnnnnnnnnnnnnnnnnnnnnnnnnnnnnnnnnnnnnnnnnnnnnnnnnnnnnnnnnnnnnnnnnnnnnnnnnnnnnnnnnnnnnnnnnnnnnnnnnnnnnnnnnnnnnnnnnnnnnnnnnnnnnnnnnnnnnnnnnnnnnnnnnnnnnnnnnnnnnnnnnnnnnnnnnnnnnnnnnnnnnnnnnnnnnnnnnnnnnnnnnnnnnnnnnnnnnnnnnnnnnnnnnnnnnnnnnnnnnnnnnnnnnnnnnnnnnnnnnnnnnnnnnnnnnnnnnnnnnnnnnnnnnnnnnnnnnnnnnnnnnnnnnnnnnnnnnnnnnnnnnnnnnnnnnnnnnnnnnnnnnnnnnnnnnnnnnnnnnnnnnnnnnnnnnnnnnnnnnnnnnnnnnnnnnnnnnnnnnnnnnnnnnnnnnnnnnnnnnnnnnnnnnnnnnnnnnnnnnnnnnnnnnnnnnnnnnnnnnnnnnnnnnnnnnnnnnnnnnnnnnnnnnnnnnnnnnnnnnnnnnnnnnnnnnnnnnnnnnnnnnnnnnnnnnnnnnnnnnnnnnnnnnnnnnnnnnnnnnnnnnnnnnnnnnnnnnnnnnnnnnnnnnnnnnnnnnnnnnnnnnnnnnnnnnnnnnnnnnnnnnnnnnnnnnnnnnnnnnnnnnnnnnnnnnnnnnnnnnnnnnnnnnnnnnnnnnnnnnnnnnnnnnnnnnnnnnnnnnnnnnnnnnnnnnnnnnnnnnnnnnnnnnnnnnnnnnnnnnnnnnnnnnnnnnnnnnnnnnnnnnnnnnnnnnnnnnnnnnnnnnnnnnnnnnnnnnnnnnnnnnnnnnnnnnnnnnnnnnnnnnnnnnnnnnnnnnnnnnnnnnnnnnnnnnnnnnnnnnnnnnnnnnnnnnnnnnnnnnnnnnnnnnnnnnnnnnnnnnnnnnnnnnnnnnnnnnnnnnnnnnnnnnnnnnnnnnnnnnnnnnnnnnnnnnnnnnnnnnnnnnnnnnnnnnnnnnnnnnnnnnnnnnnnnnnnnnnnnnnnnnnnnnnnnnnnnnnnnnnnnnnnnnnnnnnnnnnnnnnnnnnnnnnnnnnnnnnnnnnnnnnnnnnnnnnnnnnnnnnnnnnnnnnnnnnnnnnnnnnnnnnnnnnnnnnnnnnnnnnnnnnnnnnnnnnnnnnnnnnnnnnnnnnnnnnnnnnnnnnnnnnnnnnnnnnnnnnnnnnnnnnnnnnnnnnnnnnnnnnnnnnnnnnnnnnnnnnnnnnnnnnnnnnnnnnnnnnnnnnnnnnnnnnnnnnnnnnnnnnnnnnnnnnnnnnnnnnnnnnnnnnnnnnnnnnnnnnnnnnnnnnnnnnnnnnnnnnnnnnnnnnnnnnnnnnnnnnnnnnnnnnnnnnnnnnnnnnnnnnnnnnnnnnnnnnnnnnnnnnnnnnnnnnnnnnnnnnnnnnnnnnnnnnnnnnnnnnnnnnnnnnnnnnnnnnnnnnnnnnnnnnnnnnnnnnnnnnnnnnnnnnnnnnnnnnnnnnnnnnnnnnnnnnnnnnnnnnnnnnnnnnnnnnnnnnnnnnnnnnnnnnnnnnnnnnnnnnnnnnnnnnnnnnnnnnnnnnnnnnnnnnnnnnnnnnnnnnnnnnnnnnnnnnnnnnnnnnnnnnnnnnnnnnnnnnnnnnnnnnnnnnnnnnnnnnnnnnnnnnnnnnnnnnnnnnnnnnnnnnnnnnnnnnnnnnnnnnnnnnnnnnnnnnnnnnnnnnnnnnnnnnnnnnnnnnnnnnnnnnnnnnnnnnnnnnnnnnnnnnnnnnnnnnnnnnnnnnnnnnnnnnnnnnnnnnnnnnnnnnnnnnnnnnnnnnnnnnnnnnnnnnnnnnnnnnnnnnnnnnnnnnnnnnnnnnnnnnnnnnnnnnnnnnnnnnnnnnnnnnnnnnnnnnnnnnnnnnnnnnnnnnnnnnnnnnnnnnnnnnnnnnnnnnnnnnnnnnnnnnnnnnnnnnnnnnnnnnnnnnnnnnnnnnnnnnnnnnnnnnnnnnnnnnnnnnnnnnnnnnnnnnnnnnnnnnnnnnnnnnnnnnnnnnnnnnnnnnnnnnnnnnnnnnnnnnnnnnnnnnnnnnnnnnnnnnnnnnnnnnnnnnnnnnnnnnnnnnnnnnnnnnnnnnnnnnnnnnnnnnnnnnnnnnnnnnnnnnnnnnnnnnnnnnnnnnnnnnnnnnnnnnnnnnnnnnnnnnnnnnnnnnnnnnnnnnnnnnnnnnnnnnnnnnnnnnnnnnnnnnnnnnnnnnnnnnnnnnnnnnnnnnnnnnnnnnnnnnnnnnnnnnnnnnnnnnnnnnnnnnnnnnnnnnnnnnnnnnnnnnnnnnnnnnnnnnnnnnnnnnnnnnnnnnnnnnnnnnnnnnnnnnnnnnnnnnnnnnnnnnnnnnnnnnnnnnnnnnnnnnnnnnnnnnnnnnnnnnnnnnnnnnnnnnnnnnnnnnnnnnnnnnnnnnnnnnnnnnnnnnnnnnnnnnnnnnnnnnnnnnnnnnnnnnnnnnnnnnnnnnnnnnnnnnnnnnnnnnnnnnnnnnnnnnnnnnnnnnnnnnnnnnnnnnnnnnnnnnnnnnnnnnnnnnnnnnnnnnnnnnnnnnnnnnnnnnnnnnnnnnnnnnnnnnnnnnnnnnnnnnnnnnnnnnnnnnnnnnnnnnnnnnnnnnnnnnnnnnnnnnnnnnnnnnnnnnnnnnnnnnnnnnnnnnnnnnnnnnnnnnnnnnnnnnnnnnnnnnnnnnnnnnnnnnnnnnnnnnnnnnnnnnnnnnnnnnnnnnnnnnnnnnnnnnnnnnnnnnnnnnnnnnnnnnnnnnnnnnnnnnnnnnnnnnnnnnnnnnnnnnnnnnnnnnnnnnnnnnnnnnnnnnnnnnnnnnnnnnnnnnnnnnnnnnnnnnnnnnnnnnnnnnnnnnnnnnnnnnnnnnnnnnnnnnnnnnnnnnnnnnnnnnnnnnnnnnnnnnnnnnnnnnnnnnnnnnnnnnnnnnnnnnnnnnnnnnnnnnnnnnnnnnnnnnnnnnnnnnnnnnnnnnnnnnnnnnnnnnnnnnnnnnnnnnnnnnnnnnnnnnnnnnnnnnnnnnnnnnnnnnnnnnnnnnnnnnnnnnnnnnnnnnnnnnnnnnnnnnnnnnnnnnnnnnnnnnnnnnnnnnnnnnnnnnnnnnnnnnnnnnnnnnnnnnnnnnnnnnnnnnnnnnnnnnnnnnnnnnnnnnnnnnnnnnnnnnnnnnnnnnnnnnnnnnnnnnnnnnnnnnnnnnnnnnnnnnnnnnnnnnnnnnnnnnnnnnnnnnnnnnnnnnnnnnnnnnnnnnnnnnnnnnnnnnnnnnnnnnnnnnnnnnnnnnnnnnnnnnnnnnnnnnnnnnnnnnnnnnnnnnnnnnnnnnnnnnnnnnnnnnnnnnnnnnnnnnnnnnnnnnnnnnnnnnnnnnnnnnnnnnnnnnnnnnnnnnnnnnnnnnnnnnnnnnnnnnnnnnnnnnnnnnnnnnnnnnnnnnnnnnnnnnnnnnnnnnnnnnnnnnnnnnnnnnnnnnnnnnnnnnnnnnnnnnnnnnnnnnnnnnnnnnnnnnnnnnnnnnnnnnnnnnnnnnnnnnnnnnnnnnnnnnnnnnnnnnnnnnnnnnnnnnnnnnnnnnnnnnnnnnnnnnnnnnnnnnnnnnnnnnnnnnnnnnnnnnnnnnnnnnnnnnnnnnnnnnnnnnnnnnnnnnnnnnnnnnnnnnnnnnnnnnnnnnnnnnnnnnnnnnnnnnnnnnnnnnnnnnnnnnnnnnnnnnnnnnnnnnnnnnnnnnnnnnnnnnnnnnnnnnnnnnnnnnnnnnnnnnnnnnnnnnnnnnnnnnnnnnnnnnnnnnnnnnnnnnnnnnnnnnnnnnnnnnnnnnnnnnnnnnnnnnnnnnnnnnnnnnnnnnnnnnnnnnnnnnnnnnnnnnnnnnnnnnnnnnnnnnnnnnnnnnnnnnnnnnnnnnnnnnnnnnnnnnnnnnnnnnnnnnnnnnnnnnnnnnnnnnnnnnnnnnnnnnnnnnnnnnnnnnnnnnnnnnnnnnnnnnnnnnnnnnnnnnnnnnnnnnnnnnnnnnnnnnnnnnnnnnnnnnnnnnnnnnnnnnnnnnnnnnnnnnnnnnnnnnnnnnnnnnnnnnnnnnnnnnnnnnnnnnnnnnnnnnnnnnnnnnnnnnnnnnnnnnnnnnnnnnnnnnnnnnnnnnnnnnnnnnnnnnnnnnnnnnnnnnnnnnnnnnnnnnnnnnnnnnnnnnnnnnnnnnnnnnnnnnnnnnnnnnnnnnnnnnnnnnnnnnnnnnnnnnnnnnnnnnnnnnnnnnnnnnnnnnnnnnnnnnnnnnnnnnnnnnnnnnnnnnnnnnnnnnnnnnnnnnnnnnnnnnnnnnnnnnnnnnnnnnnnnnnnnnnnnnnnnnnnnnnnnnnnnnnnnnnnnnnnnnnnnnnnnnnnnnnnnnnnnnnnnnnnnnnnnnnnnnnnnnnnnnnnnnnnnnnnnnnnnnnnnnnnnnnnnnnnnnnnnnnnnnnnnnnnnnnnnnnnnnnnnnnnnnnnnnnnnnnnnnnnnnnnnnnnnnnnnnnnnnnnnnnnnnnnnnnnnnnnnnnnnnnnnnnnnnnnnnnnnnnnnnnnnnnnnnnnnnnnnnnnnnnnnnnnnnnnnnnnnnnnnnnnnnnnnnnnnnnnnnnnnnnnnnnnnnnnnnnnnnnnnnnnnnnnnnnnnnnnnnnnnnnnnnnnnnnnnnnnnnnnnnnnnnnnnnnnnnnnnnnnnnnnnnnnnnnnnnnnnnnnnnnnnnnnnnnnnnnnnnnnnnnnnnnnnnnnnnnnnnnnnnnnnnnnnnnnnnnnnnnnnnnnnnnnnnnnnnnnnnnnnnnnnnnnnnnnnnnnnnnnnnnnnnnnnnnnnnnnnnnnnnnnnnnnnnnnnnnnnnnnnnnnnnnnnnnnnnnnnnnnnnnnnnnnnnnnnnnnnnnnnnnnnnnnnnnnnnnnnnnnnnnnnnnnnnnnnnnnnnnnnnnnnnnnnnnnnnnnnnnnnnnnnnnnnnnnnnnnnnnnnnnnnnnnnnnnnnnnnnnnnnnnnnnnnnnnnnnnnnnnnnnnnnnnnnnnnnnnnnnnnnnnnnnnnnnnnnnnnnnnnnnnnnnnnnnnnnnnnnnnnnnnnnnnnnnnnnnnnnnnnnnnnnnnnnnnnnnnnnnnnnnnnnnnnnnnnnnnnnnnnnnnnnnnnnnnnnnnnnnnnnnnnnnnnnnnnnnnnnnnnnnnnnnnnnnnnnnnnnnnnnnnnnnnnnnnnnnnnnnnnnnnnnnnnnnnnnnnnnnnnnnnnnnnnnnnnnnnnnnnnnnnnnnnnnnnnnnnnnnnnnnnnnnnnnnnnnnnnnnnnnnnnnnnnnnnnnnnnnnnnnnnnnnnnnnnnnnnnnnnnnnnnnnnnnnnnnnnnnnnnnnnnnnnnnnnnnnnnnnnnnnnnnnnnnnnnnnnnnnnnnnnnnnnnnnnnnnnnnnnnnnnnnnnnnnnnnnnnnnnnnnnnnnnnnnnnnnnnnnnnnnnnnnnnnnnnnnnnnnnnnnnnnnnnnnnnnnnnnnnnnnnnnnnnnnnnnnnnnnnnnnnnnnnnnnnnnnnnnnnnnnnnnnnnnnnnnnnnnnnnnnnnnnnnnnnnnnnnnnnnnnnnnnnnnnnnnnnnnnnnnnnnnnnnnnnnnnnnnnnnnnnnnnnnnnnnnnnnnnnnnnnnnnnnnnnnnnnnnnnnnnnnnnnnnnnnnnnnnnnnnnnnnnnnnnnnnnnnnnnnnnnnnnnnnnnnnnnnnnnnnnnnnnnnnnnnnnnnnnnnnnnnnnnnnnnnnnnnnnnnnnnnnnnnnnnnnnnnnnnnnnnnnnnnnnnnnnnnnnnnnnnnnnnnnnnnnnnnnnnnnnnnnnnnnnnnnnnnnnnnnnnnnnnnnnnnnnnnnnnnnnnnnnnnnnnnnnnnnnnnnnnnnnnnnnnnnnnnnnnnnnnnnnnnnnnnnnnnnnnnnnnnnnnnnnnnnnnnnnnnnnnnnnnnnnnnnnnnnnnnnnnnnnnnnnnnnnnnnnnnnnnnnnnnnnnnnnnnnnnnnnnnnnnnnnnnnnnnnnnnnnnnnnnnnnnnnnnnnnnnnnnnnnnnnnnnnnnnnnnnnnnnnnnnnnnnnnnnnnnnnnnnnnnnnnnnnnnnnnnnnnnnnnnnnnnnnnnnnnnnnnnnnnnnnnnnnnnnnnnnnnnnnnnnnnnnnnnnnnnnnnnnnnnnnnnnnnnnnnnnnnnnnnnnnnnnnnnnnnnnnnnnnnnnnnnnnnnnnnnnnnnnnnnnnnnnnnnnnnnnnnnnnnnnnnnnnnnnnnnnnnnnnnnnnnnnnnnnnnnnnnnnnnnnnnnnnnnnnnnnnnnnnnnnnnnnnnnnnnnnnnnnnnnnnnnnnnnnnnnnnnnnnnnnnnnnnnnnnnnnnnnnnnnnnnnnnnnnnnnnnnnnnnnnnnnnnnnnnnnnnnnnnnnnnnnnnnnnnnnnnnnnnnnnnnnnnnnnnnnnnnnnnnnnnnnnnnnnnnnnnnnnnnnnnnnnnnnnnnnnnnnnnnnnnnnnnnnnnnnnnnnnnnnnnnnnnnnnnnnnnnnnnnnnnnnnnnnnnnnnnnnnnnnnnnnnnnnnnnnnnnnnnnnnnnnnnnnnnnnnnnnnnnnnnnnnnnnnnnnnnnnnnnnnnnnnnnnnnnnnnnnnnnnnnnnnnnnnnnnnnnnnnnnnnnnnnnnnnnnnnnnnnnnnnnnnnnnnnnnnnnnnnnnnnnnnnnnnnnnnnnnnnnnnnnnnnnnnnnnnnnnnnnnnnnnnnnnnnnnnnnnnnnnnnnnnnnnnnnnnnnnnnnnnnnnnnnnnnnnnnnnnnnnnnnnnnnnnnnnnnnnnnnnnnnnnnnnnnnnnnnnnnnnnnnnnnnnnnnnnnnnnnnnnnnnnnnnnnnnnnnnnnnnnnnnnnnnnnnnnnnnnnnnnnnnnnnnnnnnnnnnnnnnnnnnnnnnnnnnnnnnnnnnnnnnnnnnnnnnnnnnnnnnnnnnnnnnnnnnnnnnnnnnnnnnnnnnnnnnnnnnnnnnnnnnnnnnnnnnnnnnnnnnnnnnnnnnnnnnnnnnnnnnnnnnnnnnnnnnnnnnnnnnnnnnnnnnnnnnnnnnnnnnnnnnnnnnnnnnnnnnnnnnnnnnnnnnnnnnnnnnnnnnnnnnnnnnnnnnnnnnnnnnnnnnnnnnnnnnnnnnnnnnnnnnnnnnnnnnnnnnnnnnnnnnnnnnnnnnnnnnnnnnnnnnnnnnnnnnnnnnnnnnnnnnnnnnnnnnnnnnnnnnnnnnnnnnnnnnnnnnnnnnnnnnnnnnnnnnnnnnnnnnnnnnnnnnnnnnnnnnnnnnnnnnnnnnnnnnnnnnnnnnnnnnnnnnnnnnnnnnnnnnnnnnnnnnnnnnnnnnnnnnnnnnnnnnnnnnnnnnnnnnnnnnnnnnnnnnnnnnnnnnnnnnnnnnnnnnnnnnnnnnnnnnnnnnnnnnnnnnnnnnnnnnnnnnnnnnnnnnnnnnnnnnnnnnnnnnnnnnnnnnnnnnnnnnnnnnnnnnnnnnnnnnnnnnnnnnnnnnnnnnnnnnnnnnnnnnnnnnnnnnnnnnnnnnnnnnnnnnnnnnnnnnnnnnnnnnnnnnnnnnnnnnnnnnnnnnnnnnnnnnnnnnnnnnnnnnnnnnnnnnnnnnnnnnnnnnnnnnnnnnnnnnnnnnnnnnnnnnnnnnnnnnnnnnnnnnnnnnnnnnnnnnnnnnnnnnnnnnnnnnnnnnnnnnnnnnnnnnnnnnnnnnnnnnnnnnnnnnnnnnnnnnnnnnnnnnnnnnnnnnnnnnnnnnnnnnnnnnnnnnnnnnnnnnnnnnnnnnnnnnnnnnnnnnnnnnnnnnnnnnnnnnnnnnnnnnnnnnnnnnnnnnnnnnnnnnnnnnnnnnnnnnnnnnnnnnnnnnnnnnnnnnnnnnnnnnnnnnnnnnnnnnnnnnnnnnnnnnnnnnnnnnnnnnnnnnnnnnnnnnnnnnnnnnnnnnnnnnnnnnnnnnnnnnnnnnnnnnnnnnnnnnnnnnnnnnnnnnnnnnnnnnnnnnnnnnnnnnnnnnnnnnnnnnnnnnnnnnnnnnnnnnnnnnnnnnnnnnnnnnnnnnnnnnnnnnnnnnnnnnnnnnnnnnnnnnnnnnnnnnnnnnnnnnnnnnnnnnnnnnnnnnnnnnnnnnnnnnnnnnnnnnnnnnnnnnnnnnnnnnnnnnnnnnnnnnnnnnnnnnnnnnnnnnnnnnnnnnnnnnnnnnnnnnnnnnnnnnnnnnnnnnnnnnnnnnnnnnnnnnnnnnnnnnnnnnnnnnnnnnnnnnnnnnnnnnnnnnnnnnnnnnnnnnnnnnnnnnnnnnnnnnnnnnnnnnnnnnnnnnnnnnnnnnnnnnnnnnnnnnnnnnnnnnnnnnnnnnnnnnnnnnnnnnnnnnnnnnnnnnnnnnnnnnnnnnnnnnnnnnnnnnnnnnnnnnnnnnnnnnnnnnnnnnnnnnnnnnnnnnnnnnnnnnnnnnnnnnnnnnnnnnnnnnnnnnnnnnnnnnnnnnnnnnnnnnnnnnnnnnnnnnnnnnnnnnnnnnnnnnnnnnnnnnnnnnnnnnnnnnnnnnnnnnnnnnnnnnnnnnnnnnnnnnnnnnnnnnnnnnnnnnnnnnnnnnnnnnnnnnnnnnnnnnnnnnnnnnnnnnnnnnnnnnnnnnnnnnnnnnnnnnnnnnnnnnnnnnnnnnnnnnnnnnnnnnnnnnnnnnnnnnnnnnnnnnnnnnnnnnnnnnnnnnnnnnnnnnnnnnnnnnnnnnnnnnnnnnnnnnnnnnnnnnnnnnnnnnnnnnnnnnnnnnnnnnnnnnnnnnnnnnnnnnnnnnnnnnnnnnnnnnnnnnnnnnnnnnnnnnnnnnnnnnnnnnnnnnnnnnnnnnnnnnnnnnnnnnnnnnnnnnnnnnnnnnnnnnnnnnnnnnnnnnnnnnnnnnnnnnnnnnnnnnnnnnnnnnnnnnnnnnnnnnnnnnnnnnnnnnnnnnnnnnnnnnnnnnnnnnnnnnnnnnnnnnnnnnnnnnnnnnnnnnnnnnnnnnnnnnnnnnnnnnnnnnnnnnnnnnnnnnnnnnnnnnnnnnnnnnnnnnnnnnnnnnnnnnnnnnnnnnnnnnnnnnnnnnnnnnnnnnnnnnnnnnnnnnnnnnnnnnnnnnnnnnnnnnnnnnnnnnnnnnnnnnnnnnnnnnnnnnnnnnnnnnnnnnnnnnnnnnnnnnnnnnnnnnnnnnnnnnnnnnnnnnnnnnnnnnnnnnnnnnnnnnnnnnnnnnnnnnnnnnnnnnnnnnnnnnnnnnnnnnnnnnnnnnnnnnnnnnnnnnnnnnnnnnnnnnnnnnnnnnnnnnnnnnnnnnnnnnnnnnnnnnnnnnnnnnnnnnnnnnnnnnnnnnnnnnnnnnnnnnnnnnnnnnnnnnnnnnnnnnnnnnnnnnnnnnnnnnnnnnnnnnnnnnnnnnnnnnnnnnnnnnnnnnnnnnnnnnnnnnnnnnnnnnnnnnnnnnnnnnnnnnnnnnnnnnnnnnnnnnnnnnnnnnnnnnnnnnnnnnnnnnnnnnnnnnnnnnnnnnnnnnnnnnnnnnnnnnnnnnnnnnnnnnnnnnnnnnnnnnnnnnnnnnnnnnnnnnnnnnnnnnnnnnnnnnnnnnnnnnnnnnnnnnnnnnnnnnnnnnnnnnnnnnnnnnnnnnnnnnnnnnnnnnnnnnnnnnnnnnnnnnnnnnnnnnnnnnnnnnnnnnnnnnnnnnnnnnnnnnnnnnnnnnnnnnnnnnnnnnnnnnnnnnnnnnnnnnnnnnnnnnnnnnnnnnnnnnnnnnnnnnnnnnnnnnnnnnnnnnnnnnnnnnnnnnnnnnnnnnnnnnnnnnnnnnnnnnnnnnnnnnnnnnnnnnnnnnnnnnnnnnnnnnnnnnnnnnnnnnnnnnnnnnnnnnnnnnnnnnnnnnnnnnnnnnnnnnnnnnnnnnnnnnnnnnnnnnnnnnnnnnnnnnnnnnnnnnnnnnnnnnnnnnnnnnnnnnnnnnnnnnnnnnnnnnnnnnnnnnnnnnnnnnnnnnnnnnnnnnnnnnnnnnnnnnnnnnnnnnnnnnnnnnnnnnnnnnnnnnnnnnnnnnnnnnnnnnnnnnnnnnnnnnnnnnnnnnnnnnnnnnnnnnnnnnnnnnnnnnnnnnnnnnnnnnnnnnnnnnnnnnnnnnnnnnnnnnnnnnnnnnnnnnnnnnnnnnnnnnnnnnnnnnnnnnnnnnnnnnnnnnnnnnnnnnnnnnnnnnnnnnnnnnnnnnnnnnnnnnnnnnnnnnnnnnnnnnnnnnnnnnnnnnnnnnnnnnnnnnnnnnnnnnnnnnnnnnnnnnnnnnnnnnnnnnnnnnnnnnnnnnnnnnnnnnnnnnnnnnnnnnnnnnnnnnnnnnnnnnnnnnnnnnnnnnnnnnnnnnnnnnnnnnnnnnnnnnnnnnnnnnnnnnnnnnnnnnnnnnnnnnnnnnnnnnnnnnnnnnnnnnnnnnnnnnnnnnnnnnnnnnnnnnnnnnnnnnnnnnnnnnnnnnnnnnnnnnnnnnnnnnnnnnnnnnnnnnnnnnnnnnnnnnnnnnnnnnnnnnnnnnnnnnnnnnnnnnnnnnnnnnnnnnnnnnnnnnnnnnnnnnnnnnnnnnnnnnnnnnnnnnnnnnnnnnnnnnnnnnnnnnnnnnnnnnnnnnnnnnnnnnnnnnnnnnnnnnnnnnnnnnnnnnnnnnnnnnnnnnnnnnnnnnnnnnnnnnnnnnnnnnnnnnnnnnnnnnnnnnnnnnnnnnnnnnnnnnnnnnnnnnnnnnnnnnnnnnnnnnnnnnnnnnnnnnnnnnnnnnnnnnnnnnnnnnnnnnnnnnnnnnnnnnnnnnnnnnnnnnnnnnnnnnnnnnnnnnnnnnnnnnnnnnnnnnnnnnnnnnnnnnnnnnnnnnnnnnnnnnnnnnnnnnnnnnnnnnnnnnnnnnnnnnnnnnnnnnnnnnnnnnnnnnnnnnnnnnnnnnnnnnnnnnnnnnnnnnnnnnnnnnnnnnnnnnnnnnnnnnnnnnnnnnnnnnnnnnnnnnnnnnnnnnnnnnnnnnnnnnnnnnnnnnnnnnnnnnnnnnnnnnnnnnnnnnnnnnnnnnnnnnnnnnnnnnnnnnnnnnnnnnnnnnnnnnnnnnnnnnnnnnnnnnnnnnnnnnnnnnnnnnnnnnnnnnnnnnnnnnnnnnnnnnnnnnnnnnnnnnnnnnnnnnnnnnnnnnnnnnnnnnnnnnnnnnnnnnnnnnnnnnnnnnnnnnnnnnnnnnnnnnnnnnnnnnnnnnnnnnnnnnnnnnnnnnnnnnnnnnnnnnnnnnnnnnnnnnnnnnnnnnnnnnnnnnnnnnnnnnnnnnnnnnnnnnnnnnnnnnnnnnnnnnnnnnnnnnnnnnnnnnnnnnnnnnnnnnnnnnnnnnnnnnnnnnnnnnnnnnnnnnnnnnnnnnnnnnnnnnnnnnnnnnnnnnnnnnnnnnnnnnnnnnnnnnnnnnnnnnnnnnnnnnnnnnnnnnnnnnnnnnnnnnnnnnnnnnnnnnnnnnnnnnnnnnnnnnnnnnnnnnnnnnnnnnnnnnnnnnnnnnnnnnnnnnnnnnnnnnnnnnnnnnnnnnnnnnnnnnnnnnnnnnnnnnnnnnnnnnnnnnnnnnnnnnnnnnnnnnnnnnnnnnnnnnnnnnnnnnnnnnnnnnnnnnnnnnnnnnnnnnnnnnnnnnnnnnnnnnnnnnnnnnnnnnnnnnnnnnnnnnnnnnnnnnnnnnnnnnnnnnnnnnnnnnnnnnnnnnnnnnnnnnnnnnnnnnnnnnnnnnnnnnnnnnnnnnnnnnnnnnnnnnnnnnnnnnnnnnnnnnnnnnnnnnnnnnnnnnnnnnnnnnnnnnnnnnnnnnnnnnnnnnnnnnnnnnnnnnnnnnnnnnnnnnnnnnnnnnnnnnnnnnnnnnnnnnnnnnnnnnnnnnnnnnnnnnnnnnnnnnnnnnnnnnnnnnnnnnnnnnnnnnnnnnnnnnnnnnnnnnnnnnnnnnnnnnnnnnnnnnnnnnnnnnnnnnnnnnnnnnnnnnnnnnnnnnnnnnnnnnnnnnnnnnnnnnnnnnnnnnnnnnnnnnnnnnnnnnnnnnnnnnnnnnnnnnnnnnnnnnnnnnnnnnnnnnnnnnnnnnnnnnnnnnnnnnnnnnnnnnnnnnnnnnnnnnnnnnnnnnnnnnnnnnnnnnnnnnnnnnnnnnnnnnnnnnnnnnnnnnnnnnnnnnnnnnnnnnnnnnnnnnnnnnnnnnnnnnnnnnnnnnnnnnnnnnnnnnnnnnnnnnnnnnnnnnnnnnnnnnnnnnnnnnnnnnnnnnnnnnnnnnnnnnnnnnnnnnnnnnnnnnnnnnnnnnnnnnnnnnnnnnnnnnnnnnnnnnnnnnnnnnnnnnnnnnnnnnnnnnnnnnnnnnnnnnnnnnnnnnnnnnnnnnnnnnnnnnnnnnnnnnnnnnnnnnnnnnnnnnnnnnnnnnnnnnnnnnnnnnnnnnnnnnnnnnnnnnnnnnnnnnnnnnnnnnnnnnnnnnnnnnnnnnnnnnnnnnnnnnnnnnnnnnnnnnnnnnnnnnnnnnnnnnnnnnnnnnnnnnnnnnnnnnnnnnnnnnnnnnnnnnnnnnnnnnnnnnnnnnnnnnnnnnnnnnnnnnnnnnnnnnnnnnnnnnnnnnnnnnnnnnnnnnnnnnnnnnnnnnnnnnnnnnnnnnnnnnnnnnnnnnnnnnnnnnnnnnnnnnnnnnnnnnnnnnnnnnnnnnnnnnnnnnnnnnnnnnnnnnnnnnnnnnnnnnnnnnnnnnnnnnnnnnnnnnnnnnnnnnnnnnnnnnnnnnnnnnnnnnnnnnnnnnnnnnnnnnnnnnnnnnnnnnnnnnnnnnnnnnnnnnnnnnnnnnnnnnnnnnnnnnnnnnnnnnnnnnnnnnnnnnnnnnnnnnnnnnnnnnnnnnnnnnnnnnnnnnnnnnnnnnnnnnnnnnnnnnnnnnnnnnnnnnnnnnnnnnnnnnnnnnnnnnnnnnnnnnnnnnnnnnnnnnnnnnnnnnnnnnnnnnnnnnnnnnnnnnnnnnnnnnnnnnnnnnnnnnnnnnnnnnnnnnnnnnnnnnnnnnnnnnnnnnnnnnnnnnnnnnnnnnnnnnnnnnnnnnnnnnnnnnnnnnnnnnnnnnnnnnnnnnnnnnnnnnnnnnnnnnnnnnnnnnnnnnnnnnnnnnnnnnnnnnnnnnnnnnnnnnnnnnnnnnnnnnnnnnnnnnnnnnnnnnnnnnnnnnnnnnnnnnnnnnnnnnnnnnnnnnnnnnnnnnnnnnnnnnnnnnnnnnnnnnnnnnnnnnnnnnnnnnnnnnnnnnnnnnnnnnnnnnnnnnnnnnnnnnnnnnnnnnnnnnnnnnnnnnnnnnnnnnnnnnnnnnnnnnnnnnnnnnnnnnnnnnnnnnnnnnnnnnnnnnnnnnnnnnnnnnnnnnnnnnnnnnnnnnnnnnnnnnnnnnnnnnnnnnnnnnnnnnnnnnnnnnnnnnnnnnnnnnnnnnnnnnnnnnnnnnnnnnnnnnnnnnnnnnnnnnnnnnnnnnnnnnnnnnnnnnnnnnnnnnnnnnnnnnnnnnnnnnnnnnnnnnnnnnnnnnnnnnnnnnnnnnnnnnnnnnnnnnnnnnnnnnnnnnnnnnnnnnnnnnnnnnnnnnnnnnnnnnnnnnnnnnnnnnnnnnnnnnnnnnnnnnnnnnnnnnnnnnnnnnnnnnnnnnnnnnnnnnnnnnnnnnnnnnnnnnnnnnnnnnnnnnnnnnnnnnnnnnnnnnnnnnnnnnnnnnnnnnnnnnnnnnnnnnnnnnnnnnnnnnnnnnnnnnnnnnnnnnnnnnnnnnnnnnnnnnnnnnnnnnnnnnnnnnnnnnnnnnnnnnnnnnnnnnnnnnnnnnnnnnnnnnnnnnnnnnnnnnnnnnnnnnnnnnnnnnnnnnnnnnnnnnnnnnnnnnnnnnnnnnnnnnnnnnnnnnnnnnnnnnnnnnnnnnnnnnnnnnnnnnnnnnnnnnnnnnnnnnnnnnnnnnnnnnnnnnnnnnnnnnnnnnnnnnnnnnnnnnnnnnnnnnnnnnnnnnnnnnnnnnnnnnnnnnnnnnnnnnnnnnnnnnnnnnnnnnnnnnnnnnnnnnnnnnnnnnnnnnnnnnnnnnnnnnnnnnnnnnnnnnnnnnnnnnnnnnnnnnnnnnnnnnnnnnnnnnnnnnnnnnnnnnnnnnnnnnnnnnnnnnnnnnnnnnnnnnnnnnnnnnnnnnnnnnnnnnnnnnnnnnnnnnnnnnnnnnnnnnnnnnnnnnnnnnnnnnnnnnnnnnnnnnnnnnnnnnnnnnnnnnnnnnnnnnnnnnnnnnnnnnnnnnnnnnnnnnnnnnnnnnnnnnnnnnnnnnnnnnnnnnnnnnnnnnnnnnnnnnnnnnnnnnnnnnnnnnnnnnnnnnnnnnnnnnnnnnnnnnnnnnnnnnnnnnnnnnnnnnnnnnnnnnnnnnnnnnnnnnnnnnnnnnnnnnnnnnnnnnnnnnnnnnnnnnnnnnnnnnnnnnnnnnnnnnnnnnnnnnnnnnnnnnnnnnnnnnnnnnnnnnnnnnnnnnnnnnnnnnnnnnnnnnnnnnnnnnnnnnnnnnnnnnnnnnnnnnnnnnnnnnnnnnnnnnnnnnnnnnnnnnnnnnnnnnnnnnnnnnnnnnnnnnnnnnnnnnnnnnnnnnnnnnnnnnnnnnnnnnnnnnnnnnnnnnnnnnnnnnnnnnnnnnnnnnnnnnnnnnnnnnnnnnnnnnnnnnnnnnnnnnnnnnnnnnnnnnnnnnnnnnnnnnnnnnnnnnnnnnnnnnnnnnnnnnnnnnnnnnnnnnnnnnnnnnnnnnnnnnnnnnnnnnnnnnnnnnnnnnnnnnnnnnnnnnnnnnnnnnnnnnnnnnnnnnnnnnnnnnnnnnnnnnnnnnnnnnnnnnnnnnnnnnnnnnnnnnnnnnnnnnnnnnnnnnnnnnnnnnnnnnnnnnnnnnnnnnnnnnnnnnnnnnnnnnnnnnnnnnnnnnnnnnnnnnnnnnnnnnnnnnnnnnnnnnnnnnnnnnnnnnnnnnnnnnnnnnnnnnnnnnnnnnnnnnnnnnnnnnnnnnnnnnnnnnnnnnnnnnnnnnnnnnnnnnnnnnnnnnnnnnnnnnnnnnnnnnnnnnnnnnnnnnnnnnnnnnnnnnnnnnnnnnnnnnnnnnnnnnnnnnnnnnnnnnnnnnnnnnnnnnnnnnnnnnnnnnnnnnnnnnnnnnnnnnnnnnnnnnnnnnnnnnnnnnnnnnnnnnnnnnnnnnnnnnnnnnnnnnnnnnnnnnnnnnnnnnnnnnnnnnnnnnnnnnnnnnnnnnnnnnnnnnnnnnnnnnnnnnnnnnnnnnnnnnnnnnnnnnnnnnnnnnnnnnnnnnnnnnnnnnnnnnnnnnnnnnnnnnnnnnnnnnnnnnnnnnnnnnnnnnnnnnnnnnnnnnnnnnnnnnnnnnnnnnnnnnnnnnnnnnnnnnnnnnnnnnnnnnnnnnnnnnnnnnnnnnnnnnnnnnnnnnnnnnnnnnnnnnnnnnnnnnnnnnnnnnnnnnnnnnnnnnnnnnnnnnnnnnnnnnnnnnnnnnnnnnnnnnnnnnnnnnnnnnnnnnnnnnnnnnnnnnnnnnnnnnnnnnnnnnnnnnnnnnnnnnnnnnnnnnnnnnnnnnnnnnnnnnnnnnnnnnnnnnnnnnnnnnnnnnnnnnnnnnnnnnnnnnnnnnnnnnnnnnnnnnnnnnnnnnnnnnnnnnnnnnnnnnnnnnnnnnnnnnnnnnnnnnnnnnnnnnnnnnnnnnnnnnnnnnnnnnnnnnnnnnnnnnnnnnnnnnnnnnnnnnnnnnnnnnnnnnnnnnnnnnnnnnnnnnnnnnnnnnnnnnnnnnnnnnnnnnnnnnnnnnnnnnnnnnnnnnnnnnnnnnnnnnnnnnnnnnnnnnnnnnnnnnnnnnnnnnnnnnnnnnnnnnnnnnnnnnnnnnnnnnnnnnnnnnnnnnnnnnnnnnnnnnnnnnnnnnnnnnnnnnnnnnnnnnnnnnnnnnnnnnnnnnnnnnnnnnnnnnnnnnnnnnnnnnnnnnnnnnnnnnnnnnnnnnnnnnnnnnnnnnnnnnnnnnnnnnnnnnnnnnnnnnnnnnnnnnnnnnnnnnnnnnnnnnnnnnnnnnnnnnnnnnnnnnnnnnnnnnnnnnnnnnnnnnnnnnnnnnnnnnnnnnnnnnnnnnnnnnnnnnnnnnnnnnnnnnnnnnnnnnnnnnnnnnnnnnnnnnnnnnnnnnnnnnnnnnnnnnnnnnnnnnnnnnnnnnnnnnnnnnnnnnnnnnnnnnnnnnnnnnnnnnnnnnnnnnnnnnnnnnnnnnnnnnnnnnnnnnnnnnnnnnnnnnnnnnnnnnnnnnnnnnnnnnnnnnnnnnnnnnnnnnnnnnnnnnnnnnnnnnnnnnnnnnnnnnnnnnnnnnnnnnnnnnnnnnnnnnnnnnnnnnnnnnnnnnnnnnnnnnnnnnnnnnnnnnnnnnnnnnnnnnnnnnnnnnnnnnnnnnnnnnnnnnnnnnnnnnnnnnnnnnnnnnnnnnnnnnnnnnnnnnnnnnnnnnnnnnnnnnnnnnnnnnnnnnnnnnnnnnnnnnnnnnnnnnnnnnnnnnnnnnnnnnnnnnnnnnnnnnnnnnnnnnnnnnnnnnnnnnnnnnnnnnnnnnnnnnnnnnnnnnnnnnnnnnnnnnnnnnnnnnnnnnnnnnnnnnnnnnnnnnnnnnnnnnnnnnnnnnnnnnnnnnnnnnnnnnnnnnnnnnnnnnnnnnnnnnnnnnnnnnnnnnnnnnnnnnnnnnnnnnnnnnnnnnnnnnnnnnnnnnnnnnnnnnnnnnnnnnnnnnnnnnnnnnnnnnnnnnnnnnnnnnnnnnnnnnnnnnnnnnnnnnnnnnnnnnnnnnnnnnnnnnnnnnnnnnnnnnnnnnnnnnnnnnnnnnnnnnnnnnnnnnnnnnnnnnnnnnnnnnnnnnnnnnnnnnnnnnnnnnnnnnnnnnnnnnnnnnnnnnnnnnnnnnnnnnnnnnnnnnnnnnnnnnnnnnnnnnnnnnnnnnnnnnnnnnnnnnnnnnnnnnnnnnnnnnnnnnnnnnnnnnnnnnnnnnnnnnnnnnnnnnnnnnnnnnnnnnnnnnnnnnnnnnnnnnnnnnnnnnnnnnnnnnnnnnnnnnnnnnnnnnnnnnnnnnnnnnnnnnnnnnnnnnnnnnnnnnnnnnnnnnnnnnnnnnnnnnnnnnnnnnnnnnnnnnnnnnnnnnnnnnnnnnnnnnnnnnnnnnnnnnnnnnnnnnnnnnnnnnnnnnnnnnnnnnnnnnnnnnnnnnnnnnnnnnnnnnnnnnnnnnnnnnnnnnnnnnnnnnnnnnnnnnnnnnnnnnnnnnnnnnnnnnnnnnnnnnnnnnnnnnnnnnnnnnnnnnnnnnnnnnnnnnnnnnnnnnnnnnnnnnnnnnnnnnnnnnnnnnnnnnnnnnnnnnnnnnnnnnnnnnnnnnnnnnnnnnnnnnnnnnnnnnnnnnnnnnnnnnnnnnnnnnnnnnnnnnnnnnnnnnnnnnnnnnnnnnnnnnnnnnnnnnnnnnnnnnnnnnnnnnnnnnnnnnnnnnnnnnnnnnnnnnnnnnnnnnnnnnnnnnnnnnnnnnnnnnnnnnnnnnnnnnnnnnnnnnnnnnnnnnnnnnnnnnnnnnnnnnnnnnnnnnnnnnnnnnnnnnnnnnnnnnnnnnnnnnnnnnnnnnnnnnnnnnnnnnnnnnnnnnnnnnnnnnnnnnnnnnnnnnnnnnnnnnnnnnnnnnnnnnnnnnnnnnnnnnnnnnnnnnnnnnnnnnnnnnnnnnnnnnnnnnnnnnnnnnnnnnnnnnnnnnnnnnnnnnnnnnnnnnnnnnnnnnnnnnnnnnnnnnnnnnnnnnnnnnnnnnnnnnnnnnnnnnnnnnnnnnnnnnnnnnnnnnnnnnnnnnnnnnnnnnnnnnnnnnnnnnnnnnnnnnnnnnnnnnnnnnnnnnnnnnnnnnnnnnnnnnnnnnnnnnnnnnnnnnnnnnnnnnnnnnnnnnnnnnnnnnnnnnnnnnnnnnnnnnnnnnnnnnnnnnnnnnnnnnnnnnnnnnnnnnnnnnnnnnnnnnnnnnnnnnnnnnnnnnnnnnnnnnnnnnnnnnnnnnnnnnnnnnnnnnnnnnnnnnnnnnnnnnnnnnnnnnnnnnnnnnnnnnnnnnnnnnnnnnnnnnnnnnnnnnnnnnnnnnnnnnnnnnnnnnnnnnnnnnnnnnnnnnnnnnnnnnnnnnnnnnnnnnnnnnnnnnnnnnnnnnnnnnnnnnnnnnnnnnnnnnnnnnnnnnnnnnnnnnnnnnnnnnnnnnnnnnnnnnnnnnnnnnnnnnnnnnnnnnnnnnnnnnnnnnnnnnnnnnnnnnnnnnnnnnnnnnnnnnnnnnnnnnnnnnnnnnnnnnnnnnnnnnnnnnnnnnnnnnnnnnnnnnnnnnnnnnnnnnnnnnnnnnnnnnnnnnnnnnnnnnnnnnnnnnnnnnnnnnnnnnnnnnnnnnnnnnnnnnnnnnnnnnnnnnnnnnnnnnnnnnnnnnnnnnnnnnnnnnnnnnnnnnnnnnnnnnnnnnnnnnnnnnnnnnnnnnnnnnnnnnnnnnnnnnnnnnnnnnnnnnnnnnnnnnnnnnnnnnnnnnnnnnnnnnnnnnnnnnnnnnnnnnnnnnnnnnnnnnnnnnnnnnnnnnnnnnnnnnnnnnnnnnnnnnnnnnnnnnnnnnnnnnnnnnnnnnnnnnnnnnnnnnnnnnnnnnnnnnnnnnnnnnnnnnnnnnnnnnnnnnnnnnnnnnnnnnnnnnnnnnnnnnnnnnnnnnnnnnnnnnnnnnnnnnnnnnnnnnnnnnnnnnnnnnnnnnnnnnnnnnnnnnnnnnnnnnnnnnnnnnnnnnnnnnnnnnnnnnnnnnnnnnnnnnnnnnnnnnnnnnnnnnnnnnnnnnnnnnnnnnnnnnnnnnnnnnnnnnnnnnnnnnnnnnnnnnnnnnnnnnnnnnnnnnnnnnnnnnnnnnnnnnnnnnnnnnnnnnnnnnnnnnnnnnnnnnnnnnnnnnnnnnnnnnnnnnnnnnnnnnnnnnnnnnnnnnnnnnnnnnnnnnnnnnnnnnnnnnnnnnnnnnnnnnnnnnnnnnnnnnnnnnnnnnnnnnnnnnnnnnnnnnnnnnnnnnnnnnnnnnnnnnnnnnnnnnnnnnnnnnnnnnnnnnnnnnnnnnnnnnnnnnnnnnnnnnnnnnnnnnnnnnnnnnnnnnnnnnnnnnnnnnnnnnnnnnnnnnnnnnnnnnnnnnnnnnnnnnnnnnnnnnnnnnnnnnnnnnnnnnnnnnnnnnnnnnnnnnnnnnnnnnnnnnnnnnnnnnnnnnnnnnnnnnnnnnnnnnnnnnnnnnnnnnnnnnnnnnnnnnnnnnnnnnnnnnnnnnnnnnnnnnnnnnnnnnnnnnnnnnnnnnnnnnnnnnnnnnnnnnnnnnnnnnnnnnnnnnnnnnnnnnnnnnnnnnnnnnnnnnnnnnnnnnnnnnnnnnnnnnnnnnnnnnnnnnnnnnnnnnnnnnnnnnnnnnnnnnnnnnnnnnnnnnnnnnnnnnnnnnnnnnnnnnnnnnnnnnnnnnnnnnnnnnnnnnnnnnnnnnnnnnnnnnnnnnnnnnnnnnnnnnnnnnnnnnnnnnnnnnnnnnnnnnnnnnnnnnnnnnnnnnnnnnnnnnnnnnnnnnnnnnnnnnnnnnnnnnnnnnnnnnnnnnnnnnnnnnnnnnnnnnnnnnnnnnnnnnnnnnnnnnnnnnnnnnnnnnnnnnnnnnnnnnnnnnnnnnnnnnnnnnnnnnnnnnnnnnnnnnnnnnnnnnnnnnnnnnnnnnnnnnnnnnnnnnnnnnnnnnnnnnnnnnnnnnnnnnnnnnnnnnnnnnnnnnnnnnnnnnnnnnnnnnnnnnnnnnnnnnnnnnnnnnnnnnnnnnnnnnnnnnnnnnnnnnnnnnnnnnnnnnnnnnnnnnnnnnnnnnnnnnnnnnnnnnnnnnnnnnnnnnnnnnnnnnnnnnnnnnnnnnnnnnnnnnnnnnnnnnnnnnnnnnnnnnnnnnnnnnnnnnnnnnnnnnnnnnnnnnnnnnnnnnnnnnnnnnnnnnnnnnnnnnnnnnnnnnnnnnnnnnnnnnnnnnnnnnnnnnnnnnnnnnnnnnnnnnnnnnnnnnnnnnnnnnnnnnnnnnnnnnnnnnnnnnnnnnnnnnnnnnnnnnnnnnnnnnnnnnnnnnnnnnnnnnnnnnnnnnnnnnnnnnnnnnnnnnnnnnnnnnnnnnnnnnnnnnnnnnnnnnnnnnnnnnnnnnnnnnnnnnnnnnnnnnnnnnnnnnnnnnnnnnnnnnnnnnnnnnnnnnnnnnnnnnnnnnnnnnnnnnnnnnnnnnnnnnnnnnnnnnnnnnnnnnnnnnnnnnnnnnnnnnnnnnnnnnnnnnnnnnnnnnnnnnnnnnnnnnnnnnnnnnnnnnnnnnnnnnnnnnnnnnnnnnnnnnnnnnnnnnnnnnnnnnnnnnnnnnnnnnnnnnnnnnnnnnnnnnnnnnnnnnnnnnnnnnnnnnnnnnnnnnnnnnnnnnnnnnnnnnnnnnnnnnnnnnnnnnnnnnnnnnnnnnnnnnnnnnnnnnnnnnnnnnnnnnnnnnnnnnnnnnnnnnnnnnnnnnnnnnnnnnnnnnnnnnnnnnnnnnnnnnnnnnnnnnnnnnnnnnnnnnnnnnnnnnnnnnnnnnnnnnnnnnnnnnnnnnnnnnnnnnnnnnnnnnnnnnnnnnnnnnnnnnnnnnnnnnnnnnnnnnnnnnnnnnnnnnnnnnnnnnnnnnnnnnnnnnnnnnnnnnnnnnnnnnnnnnnnnnnnnnnnnnnnnnnnnnnnnnnnnnnnnnnnnnnnnnnnnnnnnnnnnnnnnnnnnnnnnnnnnnnnnnnnnnnnnnnnnnnnnnnnnnnnnnnnnnnnnnnnnnnnnnnnnnnnnnnnnnnnnnnnnnnnnnnnnnnnnnnnnnnnnnnnnnnnnnnnnnnnnnnnnnnnnnnnnnnnnnnnnnnnnnnnnnnnnnnnnnnnnnnnnnnnnnnnnnnnnnnnnnnnnnnnnnnnnnnnnnnnnnnnnnnnnnnnnnnnnnnnnnnnnnnnnnnnnnnnnnnnnnnnnnnnnnnnnnnnnnnnnnnnnnnnnnnnnnnnnnnnnnnnnnnnnnnnnnnnnnnnnnnnnnnnnnnnnnnnnnnnnnnnnnnnnnnnnnnnnnnnnnnnnnnnnnnnnnnnnnnnnnnnnnnnnnnnnnnnnnnnnnnnnnnnnnnnnnnnnnnnnnnnnnnnnnnnnnnnnnnnnnnnnnnnnnnnnnnnnnnnnnnnnnnnnnnnnnnnnnnnnnnnnnnnnnnnnnnnnnnnnnnnnnnnnnnnnnnnnnnnnnnnnnnnnnnnnnnnnnnnnnnnnnnnnnnnnnnnnnnnnnnnnnnnnnnnnnnnnnnnnnnnnnnnnnnnnnnnnnnnnnnnnnnnnnnnnnnnnnnnnnnnnnnnnnnnnnnnnnnnnnnnnnnnnnnnnnnnnnnnnnnnnnnnnnnnnnnnnnnnnnnnnnnnnnnnnnnnnnnnnnnnnnnnnnnnnnnnnnnnnnnnnnnnnnnnnnnnnnnnnnnnnnnnnnnnnnnnnnnnnnnnnnnnnnnnnnnnnnnnnnnnnnnnnnnnnnnnnnnnnnnnnnnnnnnnnnnnnnnnnnnnnnnnnnnnnnnnnnnnnnnnnnnnnnnnnnnnnnnnnnnnnnnnnnnnnnnnnnnnnnnnnnnnnnnnnnnnnnnnnnnnnnnnnnnnnnnnnnnnnnnnnnnnnnnnnnnnnnnnnnnnnnnnnnnnnnnnnnnnnnnnnnnnnnnnnnnnnnnnnnnnnnnnnnnnnnnnnnnnnnnnnnnnnnnnnnnnnnnnnnnnnnnnnnnnnnnnnnnnnnnnnnnnnnnnnnnnnnnnnnnnnnnnnnnnnnnnnnnnnnnnnnnnnnnnnnnnnnnnnnnnnnnnnnnnnnnnnnnnnnnnnnnnnnnnnnnnnnnnnnnnnnnnnnnnnnnnnnnnnnnnnnnnnnnnnnnnnnnnnnnnnnnnnnnnnnnnnnnnnnnnnnnnnnnnnnnnnnnnnnnnnnnnnnnnnnnnnnnnnnnnnnnnnnnnnnnnnnnnnnnnnnnnnnnnnnnnnnnnnnnnnnnnnnnnnnnnnnnnnnnnnnnnnnnnnnnnnnnnnnnnnnnnnnnnnnnnnnnnnnnnnnnnnnnnnnnnnnnnnnnnnnnnnnnnnnnnnnnnnnnnnnnnnnnnnnnnnnnnnnnnnnnnnnnnnnnnnnnnnnnnnnnnnnnnnnnnnnnnnnnnnnnnnnnnnnnnnnnnnnnnnnnnnnnnnnnnnnnnnnnnnnnnnnnnnnnnnnnnnnnnnnnnnnnnnnnnnnnnnnnnnnnnnnnnnnnnnnnnnnnnnnnnnnnnnnnnnnnnnnnnnnnnnnnnnnnnnnnnnnnnnnnnnnnnnnnnnnnnnnnnnnnnnnnnnnnnnnnnnnnnnnnnnnnnnnnnnnnnnnnnnnnnnnnnnnnnnnnnnnnnnnnnnnnnnnnnnnnnnnnnnnnnnnnnnnnnnnnnnnnnnnnnnnnnnnnnnnnnnnnnnnnnnnnnnnnnnnnnnnnnnnnnnnnnnnnnnnnnnnnnnnnnnnnnnnnnnnnnnnnnnnnnnnnnnnnnnnnnnnnnnnnnnnnnnnnnnnnnnnnnnnnnnnnnnnnnnnnnnnnnnnnnnnnnnnnnnnnnnnnnnnnnnnnnnnnnnnnnnnnnnnnnnnnnnnnnnnnnnnnnnnnnnnnnnnnnnnnnnnnnnnnnnnnnnnnnnnnnnnnnnnnnnnnnnnnnnnnnnnnnnnnnnnnnnnnnnnnnnnnnnnnnnnnnnnnnnnnnnnnnnnnnnnnnnnnnnnnnnnnnnnnnnnnnnnnnnnnnnnnnnnnnnnnnnnnnnnnnnnnnnnnnnnnnnnnnnnnnnnnnnnnnnnnnnnnnnnnnnnnnnnnnnnnnnnnnnnnnnnnnnnnnnnnnnnnnnnnnnnnnnnnnnnnnnnnnnnnnnnnnnnnnnnnnnnnnnnnnnnnnnnnnnnnnnnnnnnnnnnnnnnnnnnnnnnnnnnnnnnnnnnnnnnnnnnnnnnnnnnnnnnnnnnnnnnnnnnnnnnnnnnnnnnnnnnnnnnnnnnnnnnnnnnnnnnnnnnnnnnnnnnnnnnnnnnnnnnnnnnnnnnnnnnnnnnnnnnnnnnnnnnnnnnnnnnnnnnnnnnnnnnnnnnnnnnnnnnnnnnnnnnnnnnnnnnnnnnnnnnnnnnnnnnnnnnnnnnnnnnnnnnnnnnnnnnnnnnnnnnnnnnnnnnnnnnnnnnnnnnnnnnnnnnnnnnnnnnnnnnnnnnnnnnnnnnnnnnnnnnnnnnnnnnnnnnnnnnnnnnnnnnnnnnnnnnnnnnnnnnnnnnnnnnnnnnnnnnnnnnnnnnnnnnnnnnnnnnnnnnnnnnnnnnnnnnnnnnnnnnnnnnnnnnnnnnnnnnnnnnnnnnnnnnnnnnnnnnnnnnnnnnnnnnnnnnnnnnnnnnnnnnnnnnnnnnnnnnnnnnnnnnnnnnnnnnnnnnnnnnnnnnnnnnnnnnnnnnnnnnnnnnnnnnnnnnnnnnnnnnnnnnnnnnnnnnnnnnnnnnnnnnnnnnnnnnnnnnnnnnnnnnnnnnnnnnnnnnnnnnnnnnnnnnnnnnnnnnnnnnnnnnnnnnnnnnnnnnnnnnnnnnnnnnnnnnnnnnnnnnnnnnnnnnnnnnnnnnnnnnnnnnnnnnnnnnnnnnnnnnnnnnnnnnnnnnnnnnnnnnnnnnnnnnnnnnnnnnnnnnnnnnnnnnnnnnnnnnnnnnnnnnnnnnnnnnnnnnnnnnnnnnnnnnnnnnnnnnnnnnnnnnnnnnnnnnnnnnnnnnnnnnnnnnnnnnnnnnnnnnnnnnnnnnnnnnnnnnnnnnnnnnnnnnnnnnnnnnnnnnnnnnnnnnnnnnnnnnnnnnnnnnnnnnnnnnnnnnnnnnnnnnnnnnnnnnnnnnnnnnnnnnnnnnnnnnnnnnnnnnnnnnnnnnnnnnnnnnnnnnnnnnnnnnnnnnnnnnnnnnnnnnnnnnnnnnnnnnnnnnnnnnnnnnnnnnnnnnnnnnnnnnnnnnnnnnnnnnnnnnnnnnnnnnnnnnnnnnnnnnnnnnnnnnnnnnnnnnnnnnnnnnnnnnnnnnnnnnnnnnnnnnnnnnnnnnnnnnnnnnnnnnnnnnnnnnnnnnnnnnnnnnnnnnnnnnnnnnnnnnnnnnnnnnnnnnnnnnnnnnnnnnnnnnnnnnnnnnnnnnnnnnnnnnnnnnnnnnnnnnnnnnnnnnnnnnnnnnnnnnnnnnnnnnnnnnnnnnnnnnnnnnnnnnnnnnnnnnnnnnnnnnnnnnnnnnnnnnnnnnnnnnnnnnnnnnnnnnnnnnnnnnnnnnnnnnnnnnnnnnnnnnnnnnnnnnnnnnnnnnnnnnnnnnnnnnnnnnnnnnnnnnnnnnnnnnnnnnnnnnnnnnnnnnnnnnnnnnnnnnnnnnnnnnnnnnnnnnnnnnnnnnnnnnnnnnnnnnnnnnnnnnnnnnnnnnnnnnnnnnnnnnnnnnnnnnnnnnnnnnnnnnnnnnnnnnnnnnnnnnnnnnnnnnnnnnnnnnnnnnnnnnnnnnnnnnnnnnnnnnnnnnnnnnnnnnnnnnnnnnnnnnnnnnnnnnnnnnnnnnnnnnnnnnnnnnnnnnnnnnnnnnnnnnnnnnnnnnnnnnnnnnnnnnnnnnnnnnnnnnnnnnnnnnnnnnnnnnnnnnnnnnnnnnnnnnnnnnnnnnnnnnnnnnnnnnnnnnnnnnnnnnnnnnnnnnnnnnnnnnnnnnnnnnnnnnnnnnnnnnnnnnnnnnnnnnnnnnnnnnnnnnnnnnnnnnnnnnnnnnnnnnnnnnnnnnnnnnnnnnnnnnnnnnnnnnnnnnnnnnnnnnnnnnnnnnnnnnnnnnnnnnnnnnnnnnnnnnnnnnnnnnnnnnnnnnnnnnnnnnnnnnnnnnnnnnnnnnnnnnnnnnnnnnnnnnnnnnnnnnnnnnnnnnnnnnnnnnnnnnnnnnnnnnnnnnnnnnnnnnnnnnnnnnnnnnnnnnnnnnnnnnnnnnnnnnnnnnnnnnnnnnnnnnnnnnnnnnnnnnnnnnnnnnnnnnnnnnnnnnnnnnnnnnnnnnnnnnnnnnnnnnnnnnnnnnnnnnnnnnnnnnnnnnnnnnnnnnnnnnnnnnnnnnnnnnnnnnnnnnnnnnnnnnnnnnnnnnnnnnnnnnnnnnnnnnnnnnnnnnnnnnnnnnnnnnnnnnnnnnnnnnnnnnnnnnnnnnnnnnnnnnnnnnnnnnnnnnnnnnnnnnnnnnnnnnnnnnnnnnnnnnnnnnnnnnnnnnnnnnnnnnnnnnnnnnnnnnnnnnnnnnnnnnnnnnnnnnnnnnnnnnnnnnnnnnnnnnnnnnnnnnnnnnnnnnnnnnnnnnnnnnnnnnnnnnnnnnnnnnnnnnnnnnnnnnnnnnnnnnnnnnnnnnnnnnnnnnnnnnnnnnnnnnnnnnnnnnnnnnnnnnnnnnnnnnnnnnnnnnnnnnnnnnnnnnnnnnnnnnnnnnnnnnnnnnnnnnnnnnnnnnnnnnnnnnnnnnnnnnnnnnnnnnnnnnnnnnnnnnnnnnnnnnnnnnnnnnnnnnnnnnnnnnnnnnnnnnnnnnnnnnnnnnnnnnnnnnnnnnnnnnnnnnnnnnnnnnnnnnnnnnnnnnnnnnnnnnnnnnnnnnnnnnnnnnnnnnnnnnnnnnnnnnnnnnnnnnnnnnnnnnnnnnnnnnnnnnnnnnnnnnnnnnnnnnnnnnnnnnnnnnnnnnnnnnnnnnnnnnnnnnnnnnnnnnnnnnnnnnnnnnnnnnnnnnnnnnnnnnnnnnnnnnnnnnnnnnnnnnnnnnnnnnnnnnnnnnnnnnnnnnnnnnnnnnnnnnnnnnnnnnnnnnnnnnnnnnnnnnnnnnnnnnnnnnnnnnnnnnnnnnnnnnnnnnnnnnnnnnnnnnnnnnnnnnnnnnnnnnnnnnnnnnnnnnnnnnnnnnnnnnnnnnnnnnnnnnnnnnnnnnnnnnnnnnnnnnnnnnnnnnnnnnnnnnnnnnnnnnnnnnnnnnnnnnnnnnnnnnnnnnnnnnnnnnnnnnnnnnnnnnnnnnnnnnnnnnnnnnnnnnnnnnnnnnnnnnnnnnnnnnnnnnnnnnnnnnnnnnnnnnnnnnnnnnnnnnnnnnnnnnnnnnnnnnnnnnnnnnnnnnnnnnnnnnnnnnnnnnnnnnnnnnnnnnnnnnnnnnnnnnnnnnnnnnnnnnnnnnnnnnnnnnnnnnnnnnnnnnnnnnnnnnnnnnnnnnnnnnnnnnnnnnnnnnnnnnnnnnnnnnnnnnnnnnnnnnnnnnnnnnnnnnnnnnnnnnnnnnnnnnnnnnnnnnnnnnnnnnnnnnnnnnnnnnnnnnnnnnnnnnnnnnnnnnnnnnnnnnnnnnnnnnnnnnnnnnnnnnnnnnnnnnnnnnnnnnnnnnnnnnnnnnnnnnnnnnnnnnnnnnnnnnnnnnnnnnnnnnnnnnnnnnnnnnnnnnnnnnnnnnnnnnnnnnnnnnnnnnnnnnnnnnnnnnnnnnnnnnnnnnnnnnnnnnnnnnnnnnnnnnnnnnnnnnnnnnnnnnnnnnnnnnnnnnnnnnnnnnnnnnnnnnnnnnnnnnnnnnnnnnnnnnnnnnnnnnnnnnnnnnnnnnnnnnnnnnnnnnnnnnnnnnnnnnnnnnnnnnnnnnnnnnnnnnnnnnnnnnnnnnnnnnnnnnnnnnnnnnnnnnnnnnnnnnnnnnnnnnnnnnnnnnnnnnnnnnnnnnnnnnnnnnnnnnnnnnnnnnnnnnnnnnnnnnnnnnnnnnnnnnnnnnnnnnnnnnnnnnnnnnnnnnnnnnnnnnnnnnnnnnnnnnnnnnnnnnnnnnnnnnnnnnnnnnnnnnnnnnnnnnnnnnnnnnnnnnnnnnnnnnnnnnnnnnnnnnnnnnnnnnnnnnnnnnnnnnnnnnnnnnnnnnnnnnnnnnnnnnnnnnnnnnnnnnnnnnnnnnnnnnnnnnnnnnnnnnnnnnnnnnnnnnnnnnnnnnnnnnnnnnnnnnnnnnnnnnnnnnnnnnnnnnnnnnnnnnnnnnnnnnnnnnnnnnnnnnnnnnnnnnnnnnnnnnnnnnnnnnnnnnnnnnnnnnnnnnnnnnnnnnnnnnnnnnnnnnnnnnnnnnnnnnnnnnnnnnnnnnnnnnnnnnnnnnnnnnnnnnnnnnnnnnnnnnnnnnnnnnnnnnnnnnnnnnnnnnnnnnnnnnnnnnnnnnnnnnnnnnnnnnnnnnnnnnnnnnnnnnnnnnnnnnnnnnnnnnnnnnnnnnnnnnnnnnnnnnnnnnnnnnnnnnnnnnnnnnnnnnnnnnnnnnnnnnnnnnnnnnnnnnnnnnnnnnnnnnnnnnnnnnnnnnnnnnnnnnnnnnnnnnnnnnnnnnnnnnnnnnnnnnnnnnnnnnnnnnnnnnnnnnnnnnnnnnnnnnnnnnnnnnnnnnnnnnnnnnnnnnnnnnnnnnnnnnnnnnnnnnnnnnnnnnnnnnnnnnnnnnnnnnnnnnnnnnnnnnnnnnnnnnnnnnnnnnnnnnnnnnnnnnnnnnnnnnnnnnnnnnnnnnnnnnnnnnnnnnnnnnnnnnnnnnnnnnnnnnnnnnnnnnnnnnnnnnnnnnnnnnnnnnnnnnnnnnnnnnnnnnnnnnnnnnnnnnnnnnnnnnnnnnnnnnnnnnnnnnnnnnnnnnnnnnnnnnnnnnnnnnnnnnnnnnnnnnnnnnnnnnnnnnnnnnnnnnnnnnnnnnnnnnnnnnnnnnnnnnnnnnnnnnnnnnnnnnnnnnnnnnnnnnnnnnnnnnnnnnnnnnnnnnnnnnnnnnnnnnnnnnnnnnnnnnnnnnnnnnnnnnnnnnnnnnnnnnnnnnnnnnnnnnnnnnnnnnnnnnnnnnnnnnnnnnnnnnnnnnnnnnnnnnnnnnnnnnnnnnnnnnnnnnnnnnnnnnnnnnnnnnnnnnnnnnnnnnnnnnnnnnnnnnnnnnnnnnnnnnnnnnnnnnnnnnnnnnnnnnnnnnnnnnnnnnnnnnnnnnnnnnnnnnnnnnnnnnnnnnnnnnnnnnnnnnnnnnnnnnnnnnnnnnnnnnnnnnnnnnnnnnnnnnnnnnnnnnnnnnnnnnnnnnnnnnnnnnnnnnnnnnnnnnnnnnnnnnnnnnnnnnnnnnnnnnnnnnnnnnnnnnnnnnnnnnnnnnnnnnnnnnnnnnnnnnnnnnnnnnnnnnnnnnnnnnnnnnnnnnnnnnnnnnnnnnnnnnnnnnnnnnnnnnnnnnnnnnnnnnnnnnnnnnnnnnnnnnnnnnnnnnnnnnnnnnnnnnnnnnnnnnnnnnnnnnnnnnnnnnnnnnnnnnnnnnnnnnnnnnnnnnnnnnnnnnnnnnnnnnnnnnnnnnnnnnnnnnnnnnnnnnnnnnnnnnnnnnnnnnnnnnnnnnnnnnnnnnnnnnnnnnnnnnnnnnnnnnnnnnnnnnnnnnnnnnnnnnnnnnnnnnnnnnnnnnnnnnnnnnnnnnnnnnnnnnnnnnnnnnnnnnnnnnnnnnnnnnnnnnnnnnnnnnnnnnnnnnnnnnnnnnnnnnnnnnnnnnnnnnnnnnnnnnnnnnnnnnnnnnnnnnnnnnnnnnnnnnnnnnnnnnnnnnnnnnnnnnnnnnnnnnnnnnnnnnnnnnnnnnnnnnnnnnnnnnnnnnnnnnnnnnnnnnnnnnnnnnnnnnnnnnnnnnnnnnnnnnnnnnnnnnnnnnnnnnnnnnnnnnnnnnnnnnnnnnnnnnnnnnnnnnnnnnnnnnnnnnnnnnnnnnnnnnnnnnnnnnnnnnnnnnnnnnnnnnnnnnnnnnnnnnnnnnnnnnnnnnnnnnnnnnnnnnnnnnnnnnnnnnnnnnnnnnnnnnnnnnnnnnnnnnnnnnnnnnnnnnnnnnnnnnnnnnnnnnnnnnnnnnnnnnnnnnnnnnnnnnnnnnnnnnnnnnnnnnnnnnnnnnnnnnnnnnnnnnnnnnnnnnnnnnnnnnnnnnnnnnnnnnnnnnnnnnnnnnnnnnnnnnnnnnnnnnnnnnnnnnnnnnnnnnnnnnnnnnnnnnnnnnnnnnnnnnnnnnnnnnnnnnnnnnnnnnnnnnnnnnnnnnnnnnnnnnnnnnnnnnnnnnnnnnnnnnnnnnnnnnnnnnnnnnnnnnnnnnnnnnnnnnnnnnnnnnnnnnnnnnnnnnnnnnnnnnnnnnnnnnnnnnnnnnnnnnnnnnnnnnnnnnnnnnnnnnnnnnnnnnnnnnnnnnnnnnnnnnnnnnnnnnnnnnnnnnnnnnnnnnnnnnnnnnnnnnnnnnnnnnnnnnnnnnnnnnnnnnnnnnnnnnnnnnnnnnnnnnnnnnnnnnnnnnnnnnnnnnnnnnnnnnnnnnnnnnnnnnnnnnnnnnnnnnnnnnnnnnnnnnnnnnnnnnnnnnnnnnnnnnnnnnnnnnnnnnnnnnnnnnnnnnnnnnnnnnnnnnnnnnnnnnnnnnnnnnnnnnnnnnnnnnnnnnnnnnnnnnnnnnnnnnnnnnnnnnnnnnnnnnnnnnnnnnnnnnnnnnnnnnnnnnnnnnnnnnnnnnnnnnnnnnnnnnnnnnnnnnnnnnnnnnnnnnnnnnnnnnnnnnnnnnnnnnnnnnnnnnnnnnnnnnnnnnnnnnnnnnnnnnnnnnnnnnnnnnnnnnnnnnnnnnnnnnnnnnnnnnnnnnnnnnnnnnnnnnnnnnnnnnnnnnnnnnnnnnnnnnnnnnnnnnnnnnnnnnnnnnnnnnnnnnnnnnnnnnnnnnnnnnnnnnnnnnnnnnnnnnnnnnnnnnnnnnnnnnnnnnnnnnnnnnnnnnnnnnnnnnnnnnnnnnnnnnnnnnnnnnnnnnnnnnnnnnnnnnnnnnnnnnnnnnnnnnnnnnnnnnnnnnnnnnnnnnnnnnnnnnnnnnnnnnnnnnnnnnnnnnnnnnnnnnnnnnnnnnnnnnnnnnnnnnnnnnnnnnnnnnnnnnnnnnnnnnnnnnnnnnnnnnnnnnnnnnnnnnnnnnnnnnnnnnnnnnnnnnnnnnnnnnnnnnnnnnnnnnnnnnnnnnnnnnnnnnnnnnnnnnnnnnnnnnnnnnnnnnnnnnnnnnnnnnnnnnnnnnnnnnnnnnnnnnnnnnnnnnnnnnnnnnnnnnnnnnnnnnnnnnnnnnnnnnnnnnnnnnnnnnnnnnnnnnnnnnnnnnnnnnnnnnnnnnnnnnnnnnnnnnnnnnnnnnnnnnnnnnnnnnnnnnnnnnnnnnnnnnnnnnnnnnnnnnnnnnnnnnnnnnnnnnnnnnnnnnnnnnnnnnnnnnnnnnnnnnnnnnnnnnnnnnnnnnnnnnnnnnnnnnnnnnnnnnnnnnnnnnnnnnnnnnnnnnnnnnnnnnnnnnnnnnnnnnnnnnnnnnnnnnnnnnnnnnnnnnnnnnnnnnnnnnnnnnnnnnnnnnnnnnnnnnnnnnnnnnnnnnnnnnnnnnnnnnnnnnnnnnnnnnnnnnnnnnnnnnnnnnnnnnnnnnnnnnnnnnnnnnnnnnnnnnnnnnnnnnnnnnnnnnnnnnnnnnnnnnnnnnnnnnnnnnnnnnnnnnnnnnnnnnnnnnnnnnnnnnnnnnnnnnnnnnnnnnnnnnnnnnnnnnnnnnnnnnnnnnnnnnnnnnnnnnnnnnnnnnnnnnnnnnnnnnnnnnnnnnnnnnnnnnnnnnnnnnnnnnnnnnnnnnnnnnnnnnnnnnnnnnnnnnnnnnnnnnnnnnnnnnnnnnnnnnnnnnnnnnnnnnnnnnnnnnnnnnnnnnnnnnnnnnnnnnnnnnnnnnnnnnnnnnnnnnnnnnnnnnnnnnnnnnnnnnnnnnnnnnnnnnnnnnnnnnnnnnnnnnnnnnnnnnnnnnnnnnnnnnnnnnnnnnnnnnnnnnnnnnnnnnnnnnnnnnnnnnnnnnnnnnnnnnnnnnnnnnnnnnnnnnnnnnnnnnnnnnnnnnnnnnnnnnnnnnnnnnnnnnnnnnnnnnnnnnnnnnnnnnnnnnnnnnnnnnnnnnnnnnnnnnnnnnnnnnnnnnnnnnnnnnnnnnnnnnnnnnnnnnnnnnnnnnnnnnnnnnnnnnnnnnnnnnnnnnnnnnnnnnnnnnnnnnnnnnnnnnnnnnnnnnnnnnnnnnnnnnnnnnnnnnnnnnnnnnnnnnnnnnnnnnnnnnnnnnnnnnnnnnnnnnnnnnnnnnnnnnnnnnnnnnnnnnnnnnnnnnnnnnnnnnnnnnnnnnnnnnnnnnnnnnnnnnnnnnnnnnnnnnnnnnnnnnnnnnnnnnnnnnnnnnnnnnnnnnnnnnnnnnnnnnnnnnnnnnnnnnnnnnnnnnnnnnnnnnnnnnnnnnnnnnnnnnnnnnnnnnnnnnnnnnnnnnnnnnnnnnnnnnnnnnnnnnnnnnnnnnnnnnnnnnnnnnnnnnnnnnnnnnnnnnnnnnnnnnnnnnnnnnnnnnnnnnnnnnnnnnnnnnnnnnnnnnnnnnnnnnnnnnnnnnnnnnnnnnnnnnnnnnnnnnnnnnnnnnnnnnnnnnnnnnnnnnnnnnnnnnnnnnnnnnnnnnnnnnnnnnnnnnnnnnnnnnnnnnnnnnnnnnnnnnnnnnnnnnnnnnnnnnnnnnnnnnnnnnnnnnnnnnnnnnnnnnnnnnnnnnnnnnnnnnnnnnnnnnnnnnnnnnnnnnnnnnnnnnnnnnnnnnnnnnnnnnnnnnnnnnnnnnnnnnnnnnnnnnnnnnnnnnnnnnnnnnnnnnnnnnnnnnnnnnnnnnnnnnnnnnnnnnnnnnnnnnnnnnnnnnnnnnnnnnnnnnnnnnnnnnnnnnnnnnnnnnnnnnnnnnnnnnnnnnnnnnnnnnnnnnnnnnnnnnnnnnnnnnnnnnnnnnnnnnnnnnnnnnnnnnnnnnnnnnnnnnnnnnnnnnnnnnnnnnnnnnnnnnnnnnnnnnnnnnnnnnnnnnnnnnnnnnnnnnnnnnnnnnnnnnnnnnnnnnnnnnnnnnnnnnnnnnnnnnnnnnnnnnnnnnnnnnnnnnnnnnnnnnnnnnnnnnnnnnnnnnnnnnnnnnnnnnnnnnnnnnnnnnnnnnnnnnnnnnnnnnnnnnnnnnnnnnnnnnnnnnnnnnnnnnnnnnnnnnnnnnnnnnnnnnnnnnnnnnnnnnnnnnnnnnnnnnnnnnnnnnnnnnnnnnnnnnnnnnnnnnnnnnnnnnnnnnnnnnnnnnnnnnnnnnnnnnnnnnnnnnnnnnnnnnnnnnnnnnnnnnnnnnnnnnnnnnnnnnnnnnnnnnnnnnnnnnnnnnnnnnnnnnnnnnnnnnnnnnnnnnnnnnnnnnnnnnnnnnnnnnnnnnnnnnnnnnnnnnnnnnnnnnnnnnnnnnnnnnnnnnnnnnnnnnnnnnnnnnnnnnnnnnnnnnnnnnnnnnnnnnnnnnnnnnnnnnnnnnnnnnnnnnnnnnnnnnnnnnnnnnnnnnnnnnnnnnnnnnnnnnnnnnnnnnnnnnnnnnnnnnnnnnnnnnnnnnnnnnnnnnnnnnnnnnnnnnnnnnnnnnnnnnnnnnnnnnnnnnnnnnnnnnnnnnnnnnnnnnnnnnnnnnnnnnnnnnnnnnnnnnnnnnnnnnnnnnnnnnnnnnnnnnnnnnnnnnnnnnnnnnnnnnnnnnnnnnnnnnnnnnnnnnnnnnnnnnnnnnnnnnnnnnnnnnnnnnnnnnnnnnnnnnnnnnnnnnnnnnnnnnnnnnnnnnnnnnnnnnnnnnnnnnnnnnnnnnnnnnnnnnnnnnnnnnnnnnnnnnnnnnnnnnnnnnnnnnnnnnnnnnnnnnnnnnnnnnnnnnnnnnnnnnnnnnnnnnnnnnnnnnnnnnnnnnnnnnnnnnnnnnnnnnnnnnnnnnnnnnnnnnnnnnnnnnnnnnnnnnnnnnnnnnnnnnnnnnnnnnnnnnnnnnnnnnnnnnnnnnnnnnnnnnnnnnnnnnnnnnnnnnnnnnnnnnnnnnnnnnnnnnnnnnnnnnnnnnnnnnnnnnnnnnnnnnnnnnnnnnnnnnnnnnnnnnnnnnnnnnnnnnnnnnnnnnnnnnnnnnnnnnnnnnnnnnnnnnnnnnnnnnnnnnnnnnnnnnnnnnnnnnnnnnnnnnnnnnnnnnnnnnnnnnnnnnnnnnnnnnnnnnnnnnnnnnnnnnnnnnnnnnnnnnnnnnnnnnnnnnnnnnnnnnnnnnnnnnnnnnnnnnnnnnnnnnnnnnnnnnnnnnnnnnnnnnnnnnnnnnnnnnnnnnnnnnnnnnnnnnnnnnnnnnnnnnnnnnnnnnnnnnnnnnnnnnnnnnnnnnnnnnnnnnnnnnnnnnnnnnnnnnnnnnnnnnnnnnnnnnnnnnnnnnnnnnnnnnnnnnnnnnnnnnnnnnnnnnnnnnnnnnnnnnnnnnnnnnnnnnnnnnnnnnnnnnnnnnnnnnnnnnnnnnnnnnnnnnnnnnnnnnnnnnnnnnnnnnnnnnnnnnnnnnnnnnnnnnnnnnnnnnnnnnnnnnnnnnnnnnnnnnnnnnnnnnnnnnnnnnnnnnnnnnnnnnnnnnnnnnnnnnnnnnnnnnnnnnnnnnnnnnnnnnnnnnnnnnnnnnnnnnnnnnnnnnnnnnnnnnnnnnnnnnnnnnnnnnnnnnnnnnnnnnnnnnnnnnnnnnnnnnnnnnnnnnnnnnnnnnnnnnnnnnnnnnnnnnnnnnnnnnnnnnnnnnnnnnnnnnnnnnnnnnnnnnnnnnnnnnnnnnnnnnnnnnnnnnnnnnnnnnnnnnnnnnnnnnnnnnnnnnnnnnnnnnnnnnnnnnnnnnnnnnnnnnnnnnnnnnnnnnnnnnnnnnnnnnnnnnnnnnnnnnnnnnnnnnnnnnnnnnnnnnnnnnnnnnnnnnnnnnnnnnnnnnnnnnnnnnnnnnnnnnnnnnnnnnnnnnnnnnnnnnnnnnnnnnnnnnnnnnnnnnnnnnnnnnnnnnnnnnnnnnnnnnnnnnnnnnnnnnnnnnnnnnnnnnnnnnnnnnnnnnnnnnnnnnnnnnnnnnnnnnnnnnnnnnnnnnnnnnnnnnnnnnnnnnnnnnnnnnnnnnnnnnnnnnnnnnnnnnnnnnnnnnnnnnnnnnnnnnnnnnnnnnnnnnnnnnnnnnnnnnnnnnnnnnnnnnnnnnnnnnnnnnnnnnnnnnnnnnnnnnnnnnnnnnnnnnnnnnnnnnnnnnnnnnnnnnnnnnnnnnnnnnnnnnnnnnnnnnnnnnnnnnnnnnnnnnnnnnnnnnnnnnnnnnnnnnnnnnnnnnnnnnnnnnnnnnnnnnnnnnnnnnnnnnnnnnnnnnnnnnnnnnnnnnnnnnnnnnnnnnnnnnnnnnnnnnnnnnnnnnnnnnnnnnnnnnnnnnnnnnnnnnnnnnnnnnnnnnnnnnnnnnnnnnnnnnnnnnnnnnnnnnnnnnnnnnnnnnnnnnnnnnnnnnnnnnnnnnnnnnnnnnnnnnnnnnnnnnnnnnnnnnnnnnnnnnnnnnnnnnnnnnnnnnnnnnnnnnnnnnnnnnnnnnnnnnnnnnnnnnnnnnnnnnnnnnnnnnnnnnnnnnnnnnnnnnnnnnnnnnnnnnnnnnnnnnnnnnnnnnnnnnnnnnnnnnnnnnnnnnnnnnnnnnnnnnnnnnnnnnnnnnnnnnnnnnnnnnnnnnnnnnnnnnnnnnnnnnnnnnnnnnnnnnnnnnnnnnnnnnnnnnnnnnnnnnnnnnnnnnnnnnnnnnnnnnnnnnnnnnnnnnnnnnnnnnnnnnnnnnnnnnnnnnnnnnnnnnnnnnnnnnnnnnnnnnnnnnnnnnnnnnnnnnnnnnnnnnnnnnnnnnnnnnnnnnnnnnnnnnnnnnnnnnnnnnnnnnnnnnnnnnnnnnnnnnnnnnnnnnnnnnnnnnnnnnnnnnnnnnnnnnnnnnnnnnnnnnnnnnnnnnnnnnnnnnnnnnnnnnnnnnnnnnnnnnnnnnnnnnnnnnnnnnnnnnnnnnnnnnnnnnnnnnnnnnnnnnnnnnnnnnnnnnnnnnnnnnnnnnnnnnnnnnnnnnnnnnnnnnnnnnnnnnnnnnnnnnnnnnnnnnnnnnnnnnnnnnnnnnnnnnnnnnnnnnnnnnnnnnnnnnnnnnnnnnnnnnnnnnnnnnnnnnnnnnnnnnnnnnnnnnnnnnnnnnnnnnnnnnnnnnnnnnnnnnnnnnnnnnnnnnnnnnnnnnnnnnnnnnnnnnnnnnnnnnnnnnnnnnnnnnnnnnnnnnnnnnnnnnnnnnnnnnnnnnnnnnnnnnnnnnnnnnnnnnnnnnnnnnnnnnnnnnnnnnnnnnnnnnnnnnnnnnnnnnnnnnnnnnnnnnnnnnnnnnnnnnnnnnnnnnnnnnnnnnnnnnnnnnnnnnnnnnnnnnnnnnnnnnnnnnnnnnnnnnnnnnnnnnnnnnnnnnnnnnnnnnnnnnnnnnnnnnnnnnnnnnnnnnnnnnnnnnnnnnnnnnnnnnnnnnnnnnnnnnnnnnnnnnnnnnnnnnnnnnnnnnnnnnnnnnnnnnnnnnnnnnnnnnnnnnnnnnnnnnnnnnnnnnnnnnnnnnnnnnnnnnnnnnnnnnnnnnnnnnnnnnnnnnnnnnnnnnnnnnnnnnnnnnnnnnnnnnnnnnnnnnnnnnnnnnnnnnnnnnnnnnnnnnnnnnnnnnnnnnnnnnnnnnnnnnnnnnnnnnnnnnnnnnnnnnnnnnnnnnnnnnnnnnnnnnnnnnnnnnnnnnnnnnnnnnnnnnnnnnnnnnnnnnnnnnnnnnnnnnnnnnnnnnnnnnnnnnnnnnnnnnnnnnnnnnnnnnnnnnnnnnnnnnnnnnnnnnnnnnnnnnnnnnnnnnnnnnnnnnnnnnnnnnnnnnnnnnnnnnnnnnnnnnnnnnnnnnnnnnnnnnnnnnnnnnnnnnnnnnnnnnnnnnnnnnnnnnnnnnnnnnnnnnnnnnnnnnnnnnnnnnnnnnnnnnnnnnnnnnnnnnnnnnnnnnnnnnnnnnnnnnnnnnnnnnnnnnnnnnnnnnnnnnnnnnnnnnnnnnnnnnnnnnnnnnnnnnnnnnnnnnnnnnnnnnnnnnnnnnnnnnnnnnnnnnnnnnnnnnnnnnnnnnnnnnnnnnnnnnnnnnnnnnnnnnnnnnnnnnnnnnnnnnnnnnnnnnnnnnnnnnnnnnnnnnnnnnnnnnnnnnnnnnnnnnnnnnnnnnnnnnnnnnnnnnnnnnnnnnnnnnnnnnnnnnnnnnnnnnnnnnnnnnnnnnnnnnnnnnnnnnnnnnnnnnnnnnnnnnnnnnnnnnnnnnnnnnnnnnnnnnnnnnnnnnnnnnnnnnnnnnnnnnnnnnnnnnnnnnnnnnnnnnnnnnnnnnnnnnnnnnnnnnnnnnnnnnnnnnnnnnnnnnnnnnnnnnnnnnnnnnnnnnnnnnnnnnnnnnnnnnnnnnnnnnnnnnnnnnnnnnnnnnnnnnnnnnnnnnnnnnnnnnnnnnnnnnnnnnnnnnnnnnnnnnnnnnnnnnnnnnnnnnnnnnnnnnnnnnnnnnnnnnnnnnnnnnnnnnnnnnnnnnnnnnnnnnnnnnnnnnnnnnnnnnnnnnnnnnnnnnnnnnnnnnnnnnnnnnnnnnnnnnnnnnnnnnnnnnnnnnnnnnnnnnnnnnnnnnnnnnnnnnnnnnnnnnnnnnnnnnnnnnnnnnnnnnnnnnnnnnnnnnnnnnnnnnnnnnnnnnnnnnnnnnnnnnnnnnnnnnnnnnnnnnnnnnnnnnnnnnnnnnnnnnnnnnnnnnnnnnnnnnnnnnnnnnnnnnnnnnnnnnnnnnnnnnnnnnnnnnnnnnnnnnnnnnnnnnnnnnnnnnnnnnnnnnnnnnnnnnnnnnnnnnnnnnnnnnnnnnnnnnnnnnnnnnnnnnnnnnnnnnnnnnnnnnnnnnnnnnnnnnnnnnnnnnnnnnnnnnnnnnnnnnnnnnnnnnnnnnnnnnnnnnnnnnnnnnnnnnnnnnnnnnnnnnnnnnnnnnnnnnnnnnnnnnnnnnnnnnnnnnnnnnnnnnnnnnnnnnnnnnnnnnnnnnnnnnnnnnnnnnnnnnnnnnnnnnnnnnnnnnnnnnnnnnnnnnnnnnnnnnnnnnnnnnnnnnnnnnnnnnnnnnnnnnnnnnnnnnnnnnnnnnnnnnnnnnnnnnnnnnnnnnnnnnnnnnnnnnnnnnnnnnnnnnnnnnnnnnnnnnnnnnnnnnnnnnnnnnnnnnnnnnnnnnnnnnnnnnnnnnnnnnnnnnnnnnnnnnnnnnnnnnnnnnnnnnnnnnnnnnnnnnnnnnnnnnnnnnnnnnnnnnnnnnnnnnnnnnnnnnnnnnnnnnnnnnnnnnnnnnnnnnnnnnnnnnnnnnnnnnnnnnnnnnnnnnnnnnnnnnnnnnnnnnnnnnnnnnnnnnnnnnnnnnnnnnnnnnnnnnnnnnnnnnnnnnnnnnnnnnnnnnnnnnnnnnnnnnnnnnnnnnnnnnnnnnnnnnnnnnnnnnnnnnnnnnnnnnnnnnnnnnnnnnnnnnnnnnnnnnnnnnnnnnnnnnnnnnnnnnnnnnnnnnnnnnnnnnnnnnnnnnnnnnnnnnnnnnnnnnnnnnnnnnnnnnnnnnnnnnnnnnnnnnnnnnnnnnnnnnnnnnnnnnnnnnnnnnnnnnnnnnnnnnnnnnnnnnnnnnnnnnnnnnnnnnnnnnnnnnnnnnnnnnnnnnnnnnnnnnnnnnnnnnnnnnnnnnnnnnnnnnnnnnnnnnnnnnnnnnnnnnnnnnnnnnnnnnnnnnnnnnnnnnnnnnnnnnnnnnnnnnnnnnnnnnnnnnnnnnnnnnnnnnnnnnnnnnnnnnnnnnnnnnnnnnnnnnnnnnnnnnnnnnnnnnnnnnnnnnnnnnnnnnnnnnnnnnnnnnnnnnnnnnnnnnnnnnnnnnnnnnnnnnnnnnnnnnnnnnnnnnnnnnnnnnnnnnnnnnnnnnnnnnnnnnnnnnnnnnnnnnnnnnnnnnnnnnnnnnnnnnnnnnnnnnnnnnnnnnnnnnnnnnnnnnnnnnnnnnnnnnnnnnnnnnnnnnnnnnnnnnnnnnnnnnnnnnnnnnnnnnnnnnnnnnnnnnnnnnnnnnnnnnnnnnnnnnnnnnnnnnnnnnnnnnnnnnnnnnnnnnnnnnnnnnnnnnnnnnnnnnnnnnnnnnnnnnnnnnnnnnnnnnnnnnnnnnnnnnnnnnnnnnnnnnnnnnnnnnnnnnnnnnnnnnnnnnnnnnnnnnnnnnnnnnnnnnnnnnnnnnnnnnnnnnnnnnnnnnnnnnnnnnnnnnnnnnnnnnnnnnnnnnnnnnnnnnnnnnnnnnnnnnnnnnnnnnnnnnnnnnnnnnnnnnnnnnnnnnnnnnnnnnnnnnnnnnnnnnnnnnnnnnnnnnnnnnnnnnnnnnnnnnnnnnnnnnnnnnnnnnnnnnnnnnnnnnnnnnnnnnnnnnnnnnnnnnnnnnnnnnnnnnnnnnnnnnnnnnnnnnnnnnnnnnnnnnnnnnnnnnnnnnnnnnnnnnnnnnnnnnnnnnnnnnnnnnnnnnnnnnnnnnnnnnnnnnnnnnnnnnnnnnnnnnnnnnnnnnnnnnnnnnnnnnnnnnnnnnnnnnnnnnnnnnnnnnnnnnnnnnnnnnnnnnnnnnnnnnnnnnnnnnnnnnnnnnnnnnnnnnnnnnnnnnnnnnnnnnnnnnnnnnnnnnnnnnnnnnnnnnnnnnnnnnnnnnnnnnnnnnnnnnnnnnnnnnnnnnnnnnnnnnnnnnnnnnnnnnnnnnnnnnnnnnnnnnnnnnnnnnnnnnnnnnnnnnnnnnnnnnnnnnnnnnnnnnnnnnnnnnnnnnnnnnnnnnnnnnnnnnnnnnnnnnnnnnnnnnnnnnnnnnnnnnnnnnnnnnnnnnnnnnnnnnnnnnnnnnnnnnnnnnnnnnnnnnnnnnnnnnnnnnnnnnnnnnnnnnnnnnnnnnnnnnnnnnnnnnnnnnnnnnnnnnnnnnnnnnnnnnnnnnnnnnnnnnnnnnnnnnnnnnnnnnnnnnnnnnnnnnnnnnnnnnnnnnnnnnnnnnnnnnnnnnnnnnnnnnnnnnnnnnnnnnnnnnnnnnnnnnnnnnnnnnnnnnnnnnnnnnnnnnnnnnnnnnnnnnnnnnnnnnnnnnnnnnnnnnnnnnnnnnnnnnnnnnnnnnnnnnnnnnnnnnnnnnnnnnnnnnnnnnnnnnnnnnnnnnnnnnnnnnnnnnnnnnnnnnnnnnnnnnnnnnnnnnnnnnnnnnnnnnnnnnnnnnnnnnnnnnnnnnnnnnnnnnnnnnnnnnnnnnnnnnnnnnnnnnnnnnnnnnnnnnnnnnnnnnnnnnnnnnnnnnnnnnnnnnnnnnnnnnnnnnnnnnnnnnnnnnnnnnnnnnnnnnnnnnnnnnnnnnnnnnnnnnnnnnnnnnnnnnnnnnnnnnnnnnnnnnnnnnnnnnnnnnnnnnnnnnnnnnnnnnnnnnnnnnnnnnnnnnnnnnnnnnnnnnnnnnnnnnnnnnnnnnnnnnnnnnnnnnnnnnnnnnnnnnnnnnnnnnnnnnnnnnnnnnnnnnnnnnnnnnnnnnnnnnnnnnnnnnnnnnnnnnnnnnnnnnnnnnnnnnnnnnnnnnnnnnnnnnnnnnnnnnnnnnnnnnnnnnnnnnnnnnnnnnnnnnnnnnnnnnnnnnnnnnnnnnnnnnnnnnnnnnnnnnnnnnnnnnnnnnnnnnnnnnnnnnnnnnnnnnnnnnnnnnnnnnnnnnnnnnnnnnnnnnnnnnnnnnnnnnnnnnnnnnnnnnnnnnnnnnnnnnnnnnnnnnnnnnnnnnnnnnnnnnnnnnnnnnnnnnnnnnnnnnnnnnnnnnnnnnnnnnnnnnnnnnnnnnnnnnnnnnnnnnnnnnnnnnnnnnnnnnnnnnnnnnnnnnnnnnnnnnnnnnnnnnnnnnnnnnnnnnnnnnnnnnnnnnnnnnnnnnnnnnnnnnnnnnnnnnnnnnnnnnnnnnnnnnnnnnnnnnnnnnnnnnnnnnnnnnnnnnnnnnnnnnnnnnnnnnnnnnnnnnnnnnnnnnnnnnnnnnnnnnnnnnnnnnnnnnnnnnnnnnnnnnnnnnnnnnnnnnnnnnnnnnnnnnnnnnnnnnnnnnnnnnnnnnnnnnnnnnnnnnnnnnnnnnnnnnnnnnnnnnnnnnnnnnnnnnnnnnnnnnnnnnnnnnnnnnnnnnnnnnnnnnnnnnnnnnnnnnnnnnnnnnnnnnnnnnnnnnnnnnnnnnnnnnnnnnnnnnnnnnnnnnnnnnnnnnnnnnnnnnnnnnnnnnnnnnnnnnnnnnnnnnnnnnnnnnnnnnnnnnnnnnnnnnnnnnnnnnnnnnnnnnnnnnnnnnnnnnnnnnnnnnnnnnnnnnnnnnnnnnnnnnnnnnnnnnnnnnnnnnnnnnnnnnnnnnnnnnnnnnnnnnnnnnnnnnnnnnnnnnnnnnnnnnnnnnnnnnnnnnnnnnnnnnnnnnnnnnnnnnnnnnnnnnnnnnnnnnnnnnnnnnnnnnnnnnnnnnnnnnnnnnnnnnnnnnnnnnnnnnnnnnnnnnnnnnnnnnnnnnnnnnnnnnnnnnnnnnnnnnnnnnnnnnnnnnnnnnnnnnnnnnnnnnnnnnnnnnnnnnnnnnnnnnnnnnnnnnnnnnnnnnnnnnnnnnnnnnnnnnnnnnnnnnnnnnnnnnnnnnnnnnnnnnnnnnnnnnnnnnnnnnnnnnnnnnnnnnnnnnnnnnnnnnnnnnnnnnnnnnnnnnnnnnnnnnnnnnnnnnnnnnnnnnnnnnnnnnnnnnnnnnnnnnnnnnnnnnnnnnnnnnnnnnnnnnnnnnnnnnnnnnnnnnnnnnnnnnnnnnnnnnnnnnnnnnnnnnnnnnnnnnnnnnnnnnnnnnnnnnnnnnnnnnnnnnnnnnnnnnnnnnnnnnnnnnnnnnnnnnnnnnnnnnnnnnnnnnnnnnnnnnnnnnnnnnnnnnnnnnnnnnnnnnnnnnnnnnnnnnnnnnnnnnnnnnnnnnnnnnnnnnnnnnnnnnnnnnnnnnnnnnnnnnnnnnnnnnnnnnnnnnnnnnnnnnnnnnnnnnnnnnnnnnnnnnnnnnnnnnnnnnnnnnnnnnnnnnnnnnnnnnnnnnnnnnnnnnnnnnnnnnnnnnnnnnnnnnnnnnnnnnnnnnnnnnnnnnnnnnnnnnnnnnnnnnnnnnnnnnnnnnnnnnnnnnnnnnnnnnnnnnnnnnnnnnnnnnnnnnnnnnnnnnnnnnnnnnnnnnnnnnnnnnnnnnnnnnnnnnnnnnnnnnnnnnnnnnnnnnnnnnnnnnnnnnnnnnnnnnnnnnnnnnnnnnnnnnnnnnnnnnnnnnnnnnnnnnnnnnnnnnnnnnnnnnnnnnnnnnnnnnnnnnnnnnnnnnnnnnnnnnnnnnnnnnnnnnnnnnnnnnnnnnnnnnnnnnnnnnnnnnnnnnnnnnnnnnnnnnnnnnnnnnnnnnnnnnnnnnnnnnnnnnnnnnnnnnnnnnnnnnnnnnnnnnnnnnnnnnnnnnnnnnnnnnnnnnnnnnnnnnnnnnnnnnnnnnnnnnnnnnnnnnnnnnnnnnnnnnnnnnnnnnnnnnnnnnnnnnnnnnnnnnnnnnnnnnnnnnnnnnnnnnnnnnnnnnnnnnnnnnnnnnnnnnnnnnnnnnnnnnnnnnnnnnnnnnnnnnnnnnnnnnnnnnnnnnnnnnnnnnnnnnnnnnnnnnnnnnnnnnnnnnnnnnnnnnnnnnnnnnnnnnnnnnnnnnnnnnnnnnnnnnnnnnnnnnnnnnnnnnnnnnnnnnnnnnnnnnnnnnnnnnnnnnnnnnnnnnnnnnnnnnnnnnnnnnnnnnnnnnnnnnnnnnnnnnnnnnnnnnnnnnnnnnnnnnnnnnnnnnnnnnnnnnnnnnnnnnnnnnnnnnnnnnnnnnnnnnnnnnnnnnnnnnnnnnnnnnnnnnnnnnnnnnnnnnnnnnnnnnnnnnnnnnnnnnnnnnnnnnnnnnnnnnnnnnnnnnnnnnnnnnnnnnnnnnnnnnnnnnnnnnnnnnnnnnnnnnnnnnnnnnnnnnnnnnnnnnnnnnnnnnnnnnnnnnnnnnnnnnnnnnnnnnnnnnnnnnnnnnnnnnnnnnnnnnnnnnnnnnnnnnnnnnnnnnnnnnnnnnnnnnnnnnnnnnnnnnnnnnnnnnnnnnnnnnnnnnnnnnnnnnnnnnnnnnnnnnnnnnnnnnnnnnnnnnnnnnnnnnnnnnnnnnnnnnnnnnnnnnnnnnnnnnnnnnnnnnnnnnnnnnnnnnnnnnnnnnnnnnnnnnnnnnnnnnnnnnnnnnnnnnnnnnnnnnnnnnnnnnnnnnnnnnnnnnnnnnnnnnnnnnnnnnnnnnnnnnnnnnnnnnnnnnnnnnnnnnnnnnnnnnnnnnnnnnnnnnnnnnnnnnnnnnnnnnnnnnnnnnnnnnnnnnnnnnnnnnnnnnnnnnnnnnnnnnnnnnnnnnnnnnnnnnnnnnnnnnnnnnnnnnnnnnnnnnnnnnnnnnnnnnnnnnnnnnnnnnnnnnnnnnnnnnnnnnnnnnnnnnnnnnnnnnnnnnnnnnnnnnnnnnnnnnnnnnnnnnnnnnnnnnnnnnnnnnnnnnnnnnnnnnnnnnnnnnnnnnnnnnnnnnnnnnnnnnnnnnnnnnnnnnnnnnnnnnnnnnnnnnnnnnnnnnnnnnnnnnnnnnnnnnnnnnnnnnnnnnnnnnnnnnnnnnnnnnnnnnnnnnnnnnnnnnnnnnnnnnnnnnnnnnnnnnnnnnnnnnnnnnnnnnnnnnnnnnnnnnnnnnnnnnnnnnnnnnnnnnnnnnnnnnnnnnnnnnnnnnnnnnnnnnnnnnnnnnnnnnnnnnnnnnnnnnnnnnnnnnnnnnnnnnnnnnnnnnnnnnnnnnnnnnnnnnnnnnnnnnnnnnnnnnnnnnnnnnnnnnnnnnnnnnnnnnnnnnnnnnnnnnnnnnnnnnnnnnnnnnnnnnnnnnnnnnnnnnnnnnnnnnnnnnnnnnnnnnnnnnnnnnnnnnnnnnnnnnnnnnnnnnnnnnnnnnnnnnnnnnnnnnnnnnnnnnnnnnnnnnnnnnnnnnnnnnnnnnnnnnnnnnnnnnnnnnnnnnnnnnnnnnnnnnnnnnnnnnnnnnnnnnnnnnnnnnnnnnnnnnnnnnnnnnnnnnnnnnnnnnnnnnnnnnnnnnnnnnnnnnnnnnnnnnnnnnnnnnnnnnnnnnnnnnnnnnnnnnnnnnnnnnnnnnnnnnnnnnnnnnnnnnnnnnnnnnnnnnnnnnnnnnnnnnnnnnnnnnnnnnnnnnnnnnnnnnnnnnnnnnnnnnnnnnnnnnnnnnnnnnnnnnnnnnnnnnnnnnnnnnnnnnnnnnnnnnnnnnnnnnnnnnnnnnnnnnnnnnnnnnnnnnnnnnnnnnnnnnnnnnnnnnnnnnnnnnnnnnnnnnnnnnnnnnnnnnnnnnnnnnnnnnnnnnnnnnnnnnnnnnnnnnnnnnnnnnnnnnnnnnnnnnnnnnnnnnnnnnnnnnnnnnnnnnnnnnnnnnnnnnnnnnnnnnnnnnnnnnnnnnnnnnnnnnnnnnnnnnnnnnnnnnnnnnnnnnnnnnnnnnnnnnnnnnnnnnnnnnnnnnnnnnnnnnnnnnnnnnnnnnnnnnnnnnnnnnnnnnnnnnnnnnnnnnnnnnnnnnnnnnnnnnnnnnnnnnnnnnnnnnnnnnnnnnnnnnnnnnnnnnnnnnnnnnnnnnnnnnnnnnnnnnnnnnnnnnnnnnnnnnnnnnnnnnnnnnnnnnnnnnnnnnnnnnnnnnnnnnnnnnnnnnnnnnnnnnnnnnnnnnnnnnnnnnnnnnnnnnnnnnnnnnnnnnnnnnnnnnnnnnnnnnnnnnnnnnnnnnnnnnnnnnnnnnnnnnnnnnnnnnnnnnnnnnnnnnnnnnnnnnnnnnnnnnnnnnnnnnnnnnnnnnnnnnnnnnnnnnnnnnnnnnnnnnnnnnnnnnnnnnnnnnnnnnnnnnnnnnnnnnnnnnnnnnnnnnnnnnnnnnnnnnnnnnnnnnnnnnnnnnnnnnnnnnnnnnnnnnnnnnnnnnnnnnnnnnnnnnnnnnnnnnnnnnnnnnnnnnnnnnnnnnnnnnnnnnnnnnnnnnnnnnnnnnnnnnnnnnnnnnnnnnnnnnnnnnnnnnnnnnnnnnnnnnnnnnnnnnnnnnnnnnnnnnnnnnnnnnnnnnnnnnnnnnnnnnnnnnnnnnnnnnnnnnnnnnnnnnnnnnnnnnnnnnnnnnnnnnnnnnnnnnnnnnnnnnnnnnnnnnnnnnnnnnnnnnnnnnnnnnnnnnnnnnnnnnnnnnnnnnnnnnnnnnnnnnnnnnnnnnnnnnnnnnnnnnnnnnnnnnnnnnnnnnnnnnnnnnnnnnnnnnnnnnnnnnnnnnnnnnnnnnnnnnnnnnnnnnnnnnnnnnnnnnnnnnnnnnnnnnnnnnnnnnnnnnnnnnnnnnnnnnnnnnnnnnnnnnnnnnnnnnnnnnnnnnnnnnnnnnnnnnnnnnnnnnnnnnnnnnnnnnnnnnnnnnnnnnnnnnnnnnnnnnnnnnnnnnnnnnnnnnnnnnnnnnnnnnnnnnnnnnnnnnnnnnnnnnnnnnnnnnnnnnnnnnnnnnnnnnnnnnnnnnnnnnnnnnnnnnnnnnnnnnnnnnnnnnnnnnnnnnnnnnnnnnnnnnnnnnnnnnnnnnnnnnnnnnnnnnnnnnnnnnnnnnnnnnnnnnnnnnnnnnnnnnnnnnnnnnnnnnnnnnnnnnnnnnnnnnnnnnnnnnnnnnnnnnnnnnnnnnnnnnnnnnnnnnnnnnnnnnnnnnnnnnnnnnnnnnnnnnnnnnnnnnnnnnnnnnnnnnnnnnnnnnnnnnnnnnnnnnnnnnnnnnnnnnnnnnnnnnnnnnnnnnnnnnnnnnnnnnnnnnnnnnnnnnnnnnnnnnnnnnnnnnnnnnnnnnnnnnnnnnnnnnnnnnnnnnnnnnnnnnnnnnnnnnnnnnnnnnnnnnnnnnnnnnnnnnnnnnnnnnnnnnnnnnnnnnnnnnnnnnnnnnnnnnnnnnnnnnnnnnnnnnnnnnnnnnnnnnnnnnnnnnnnnnnnnnnnnnnnnnnnnnnnnnnnnnnnnnnnnnnnnnnnnnnnnnnnnnnnnnnnnnnnnnnnnnnnnnnnnnnnnnnnnnnnnnnnnnnnnnnnnnnnnnnnnnnnnnnnnnnnnnnnnnnnnnnnnnnnnnnnnnnnnnnnnnnnnnnnnnnnnnnnnnnnnnnnnnnnnnnnnnnnnnnnnnnnnnnnnnnnnnnnnnnnnnnnnnnnnnnnnnnnnnnnnnnnnnnnnnnnnnnnnnnnnnnnnnnnnnnnnnnnnnnnnnnnnnnnnnnnnnnnnnnnnnnnnnnnnnnnnnnnnnnnnnnnnnnnnnnnnnnnnnnnnnnnnnnnnnnnnnnnnnnnnnnnnnnnnnnnnnnnnnnnnnnnnnnnnnnnnnnnnnnnnnnnnnnnnnnnnnnnnnnnnnnnnnnnnnnnnnnnnnnnnnnnnnnnnnnnnnnnnnnnnnnnnnnnnnnnnnnnnnnnnnnnnnnnnnnnnnnnnnnnnnnnnnnnnnnnnnnnnnnnnnnnnnnnnnnnnnnnnnnnnnnnnnnnnnnnnnnnnnnnnnnnnnnnnnnnnnnnnnnnnnnnnnnnnnnnnnnnnnnnnnnnnnnnnnnnnnnnnnnnnnnnnnnnnnnnnnnnnnnnnnnnnnnnnnnnnnnnnnnnnnnnnnnnnnnnnnnnnnnnnnnnnnnnnnnnnnnnnnnnnnnnnnnnnnnnnnnnnnnnnnnnnnnnnnnnnnnnnnnnnnnnnnnnnnnnnnnnnnnnnnnnnnnnnnnnnnnnnnnnnnnnnnnnnnnnnnnnnnnnnnnnnnnnnnnnnnnnnnnnnnnnnnnnnnnnnnnnnnnnnnnnnnnnnnnnnnnnnnnnnnnnnnnnnnnnnnnnnnnnnnnnnnnnnnnnnnnnnnnnnnnnnnnnnnnnnnnnnnnnnnnnnnnnnnnnnnnnnnnnnnnnnnnnnnnnnnnnnnnnnnnnnnnnnnnnnnnnnnnnnnnnnnnnnnnnnnnnnnnnnnnnnnnnnnnnnnnnnnnnnnnnnnnnnnnnnnnnnnnnnnnnnnnnnnnnnnnnnnnnnnnnnnnnnnnnnnnnnnnnnnnnnnnnnnnnnnnnnnnnnnnnnnnnnnnnnnnnnnnnnnnnnnnnnnnnnnnnnnnnnnnnnnnnnnnnnnnnnnnnnnnnnnnnnnnnnnnnnnnnnnnnnnnnnnnnnnnnnnnnnnnnnnnnnnnnnnnnnnnnnnnnnnnnnnnnnnnnnnnnnnnnnnnnnnnnnnnnnnnnnnnnnnnnnnnnnnnnnnnnnnnnnnnnnnnnnnnnnnnnnnnnnnnnnnnnnnnnnnnnnnnnnnnnnnnnnnnnnnnnnnnnnnnnnnnnnnnnnnnnnnnnnnnnnnnnnnnnnnnnnnnnnnnnnnnnnnnnnnnnnnnnnnnnnnnnnnnnnnnnnnnnnnnnnnnnnnnnnnnnnnnnnnnnnnnnnnnnnnnnnnnnnnnnnnnnnnnnnnnnnnnnnnnnnnnnnnnnnnnnnnnnnnnnnnnnnnnnnnnnnnnnnnnnnnnnnnnnnnnnnnnnnnnnnnnnnnnnnnnnnnnnnnnnnnnnnnnnnnnnnnnnnnnnnnnnnnnnnnnnnnnnnnnnnnnnnnnnnnnnnnnnnnnnnnnnnnnnnnnnnnnnnnnnnnnnnnnnnnnnnnnnnnnnnnnnnnnnnnnnnnnnnnnnnnnnnnnnnnnnnnnnnnnnnnnnnnnnnnnnnnnnnnnnnnnnnnnnnnnnnnnnnnnnnnnnnnnnnnnnnnnnnnnnnnnnnnnnnnnnnnnnnnnnnnnnnnnnnnnnnnnnnnnnnnnnnnnnnnnnnnnnnnnnnnnnnnnnnnnnnnnnnnnnnnnnnnnnnnnnnnnnnnnnnnnnnnnnnnnnnnnnnnnnnnnnnnnnnnnnnnnnnnnnnnnnnnnnnnnnnnnnnnnnnnnnnnnnnnnnnnnnnnnnnnnnnnnnnnnnnnnnnnnnnnnnnnnnnnnnnnnnnnnnnnnnnnnnnnnnnnnnnnnnnnnnnnnnnnnnnnnnnnnnnnnnnnnnnnnnnnnnnnnnnnnnnnnnnnnnnnnnnnnnnnnnnnnnnnnnnnnnnnnnnnnnnnnnnnnnnnnnnnnnnnnnnnnnnnnnnnnnnnnnnnnnnnnnnnnnnnnnnnnnnnnnnnnnnnnnnnnnnnnnnnnnnnnnnnnnnnnnnnnnnnnnnnnnnnnnnnnnnnnnnnnnnnnnnnnnnnnnnnnnnnnnnnnnnnnnnnnnnnnnnnnnnnnnnnnnnnnnnnnnnnnnnnnnnnnnnnnnnnnnnnnnnnnnnnnnnnnnnnnnnnnnnnnnnnnnnnnnnnnnnnnnnnnnnnnnnnnnnnnnnnnnnnnnnnnnnnnnnnnnnnnnnnnnnnnnnnnnnnnnnnnnnnnnnnnnnnnnnnnnnnnnnnnnnnnnnnnnnnnnnnnnnnnnnnnnnnnnnnnnnnnnnnnnnnnnnnnnnnnnnnnnnnnnnnnnnnnnnnnnnnnnnnnnnnnnnnnnnnnnnnnnnnnnnnnnnnnnnnnnnnnnnnnnnnnnnnnnnnnnnnnnnnnnnnnnnnnnnnnnnnnnnnnnnnnnnnnnnnnnnnnnnnnnnnnnnnnnnnnnnnnnnnnnnnnnnnnnnnnnnnnnnnnnnnnnnnnnnnnnnnnnnnnnnnnnnnnnnnnnnnnnnnnnnnnnnnnnnnnnnnnnnnnnnnnnnnnnnnnnnnnnnnnnnnnnnnnnnnnnnnnnnnnnnnnnnnnnnnnnnnnnnnnnnnnnnnnnnnnnnnnnnnnnnnnnnnnnnnnnnnnnnnnnnnnnnnnnnnnnnnnnnnnnnnnnnnnnnnnnnnnnnnnnnnnnnnnnnnnnnnnnnnnnnnnnnnnnnnnnnnnnnnnnnnnnnnnnnnnnnnnnnnnnnnnnnnnnnnnnnnnnnnnnnnnnnnnnnnnnnnnnnnnnnnnnnnnnnnnnnnnnnnnnnnnnnnnnnnnnnnnnnnnnnnnnnnnnnnnnnnnnnnnnnnnnnnnnnnnnnnnnnnnnnnnnnnnnnnnnnnnnnnnnnnnnnnnnnnnnnnnnnnnnnnnnnnnnnnnnnnnnnnnnnnnnnnnnnnnnnnnnnnnnnnnnnnnnnnnnnnnnnnnnnnnnnnnnnnnnnnnnnnnnnnnnnnnnnnnnnnnnnnnnnnnnnnnnnnnnnnnnnnnnnnnnnnnnnnnnnnnnnnnnnnnnnnnnnnnnnnnnnnnnnnnnnnnnnnnnnnnnnnnnnnnnnnnnnnnnnnnnnnnnnnnnnnnnnnnnnnnnnnnnnnnnnnnnnnnnnnnnnnnnnnnnnnnnnnnnnnnnnnnnnnnnnnnnnnnnnnnnnnnnnnnnnnnnnnnnnnnnnnnnnnnnnnnnnnnnnnnnnnnnnnnnnnnnnnnnnnnnnnnnnnnnnnnnnnnnnnnnnnnnnnnnnnnnnnnnnnnnnnnnnnnnnnnnnnnnnnnnnnnnnnnnnnnnnnnnnnnnnnnnnnnnnnnnnnnnnnnnnnnnnnnnnnnnnnnnnnnnnnnnnnnnnnnnnnnnnnnnnnnnnnnnnnnnnnnnnnnnnnnnnnnnnnnnnnnnnnnnnnnnnnnnnnnnnnnnnnnnnnnnnnnnnnnnnnnnnnnnnnnnnnnnnnnnnnnnnnnnnnnnnnnnnnnnnnnnnnnnnnnnnnnnnnnnnnnnnnnnnnnnnnnnnnnnnnnnnnnnnnnnnnnnnnnnnnnnnnnnnnnnnnnnnnnnnnnnnnnnnnnnnnnnnnnnnnnnnnnnnnnnnnnnnnnnnnnnnnnnnnnnnnnnnnnnnnnnnnnnnnnnnnnnnnnnnnnnnnnnnnnnnnnnnnnnnnnnnnnnnnnnnnnnnnnnnnnnnnnnnnnnnnnnnnnnnnnnnnnnnnnnnnnnnnnnnnnnnnnnnnnnnnnnnnnnnnnnnnnnnnnnnnnnnnnnnnnnnnnnnnnnnnnnnnnnnnnnnnnnnnnnnnnnnnnnnnnnnnnnnnnnnnnnnnnnnnnnnnnnnnnnnnnnnnnnnnnnnnnnnnnnnnnnnnnnnnnnnnnnnnnnnnnnnnnnnnnnnnnnnnnnnnnnnnnnnnnnnnnnnnnnnnnnnnnnnnnnnnnnnnnnnnnnnnnnnnnnnnnnnnnnnnnnnnnnnnnnnnnnnnnnnnnnnnnnnnnnnnnnnnnnnnnnnnnnnnnnnnnnnnnnnnnnnnnnnnnnnnnnnnnnnnnnnnnnnnnnnnnnnnnnnnnnnnnnnnnnnnnnnnnnnnnnnnnnnnnnnnnnnnnnnnnnnnnnnnnnnnnnnnnnnnnnnnnnnnnnnnnnnnnnnnnnnnnnnnnnnnnnnnnnnnnnnnnnnnnnnnnnnnnnnnnnnnnnnnnnnnnnnnnnnnnnnnnnnnnnnnnnnnnnnnnnnnnnnnnnnnnnnnnnnnnnnnnnnnnnnnnnnnnnnnnnnnnnnnnnnnnnnnnnnnnnnnnnnnnnnnnnnnnnnnnnnnnnnnnnnnnnnnnnnnnnnnnnnnnnnnnnnnnnnnnnnnnnnnnnnnnnnnnnnnnnnnnnnnnnnnnnnnnnnnnnnnnnnnnnnnnnnnnnnnnnnnnnnnnnnnnnnnnnnnnnnnnnnnnnnnnnnnnnnnnnnnnnnnnnnnnnnnnnnnnnnnnnnnnnnnnnnnnnnnnnnnnnnnnnnnnnnnnnnnnnnnnnnnnnnnnnnnnnnnnnnnnnnnnnnnnnnnnnnnnnnnnnnnnnnnnnnnnnnnnnnnnnnnnnnnnnnnnnnnnnnnnnnnnnnnnnnnnnnnnnnnnnnnnnnnnnnnnnnnnnnnnnnnnnnnnnnnnnnnnnnnnnnnnnnnnnnnnnnnnnnnnnnnnnnnnnnnnnnnnnnnnnnnnnnnnnnnnnnnnnnnnnnnnnnnnnnnnnnnnnnnnnnnnnnnnnnnnnnnnnnnnnnnnnnnnnnnnnnnnnnnnnnnnnnnnnnnnnnnnnnnnnnnnnnnnnnnnnnnnnnnnnnnnnnnnnnnnnnnnnnnnnnnnnnnnnnnnnnnnnnnnnnnnnnnnnnnnnnnnnnnnnnnnnnnnnnnnnnnnnnnnnnnnnnnnnnnnnnnnnnnnnnnnnnnnnnnnnnnnnnnnnnnnnnnnnnnnnnnnnnnnnnnnnnnnnnnnnnnnnnnnnnnnnnnnnnnnnnnnnnnnnnnnnnnnnnnnnnnnnnnnnnnnnnnnnnnnnnnnnnnnnnnnnnnnnnnnnnnnnnnnnnnnnnnnnnnnnnnnnnnnnnnnnnnnnnnnnnnnnnnnnnnnnnnnnnnnnnnnnnnnnnnnnnnnnnnnnnnnnnnnnnnnnnnnnnnnnnnnnnnnnnnnnnnnnnnnnnnnnnnnnnnnnnnnnnnnnnnnnnnnnnnnnnnnnnnnnnnnnnnnnnnnnnnnnnnnnnnnnnnnnnnnnnnnnnnnnnnnnnnnnnnnnnnnnnnnnnnnnnnnnnnnnnnnnnnnnnnnnnnnnnnnnnnnnnnnnnnnnnnnnnnnnnnnnnnnnnnnnnnnnnnnnnnnnnnnnnnnnnnnnnnnnnnnnnnnnnnnnnnnnnnnnnnnnnnnnnnnnnnnnnnnnnnnnnnnnnnnnnnnnnnnnnnnnnnnnnnnnnnnnnnnnnnnnnnnnnnnnnnnnnnnnnnnnnnnnnnnnnnnnnnnnnnnnnnnnnnnnnnnnnnnnnnnnnnnnnnnnnnnnnnnnnnnnnnnnnnnnnnnnnnnnnnnnnnnnnnnnnnnnnnnnnnnnnnnnnnnnnnnnnnnnnnnnnnnnnnnnnnnnnnnnnnnnnnnnnnnnnnnnnnnnnnnnnnnnnnnnnnnnnnnnnnnnnnnnnnnnnnnnnnnnnnnnnnnnnnnnnnnnnnnnnnnnnnnnnnnnnnnnnnnnnnnnnnnnnnnnnnnnnnnnnnnnnnnnnnnnnnnnnnnnnnnnnnnnnnnnnnnnnnnnnnnnnnnnnnnnnnnnnnnnnnnnnnnnnnnnnnnnnnnnnnnnnnnnnnnnnnnnnnnnnnnnnnnnnnnnnnnnnnnnnnnnnnnnnnnnnnnnnnnnnnnnnnnnnnnnnnnnnnnnnnnnnnnnnnnnnnnnnnnnnnnnnnnnnnnnnnnnnnnnnnnnnnnnnnnnnnnnnnnnnnnnnnnnnnnnnnnnnnnnnnnnnnnnnnnnnnnnnnnnnnnnnnnnnnnnnnnnnnnnnnnnnnnnnnnnnnnnnnnnnnnnnnnnnnnnnnnnnnnnnnnnnnnnnnnnnnnnnnnnnnnnnnnnnnnnnnnnnnnnnnnnnnnnnnnnnnnnnnnnnnnnnnnnnnnnnnnnnnnnnnnnnnnnnnnnnnnnnnnnnnnnnnnnnnnnnnnnnnnnnnnnnnnnnnnnnnnnnnnnnnnnnnnnnnnnnnnnnnnnnnnnnnnnnnnnnnnnnnnnnnnnnnnnnnnnnnnnnnnnnnnnnnnnnnnnnnnnnnnnnnnnnnnnnnnnnnnnnnnnnnnnnnnnnnnnnnnnnnnnnnnnnnnnnnnnnnnnnnnnnnnnnnnnnnnnnnnnnnnnnnnnnnnnnnnnnnnnnnnnnnnnnnnnnnnnnnnnnnnnnnnnnnnnnnnnnnnnnnnnnnnnnnnnnnnnnnnnnnnnnnnnnnnnnnnnnnnnnnnnnnnnnnnnnnnnnnnnnnnnnnnnnnnnnnnnnnnnnnnnnnnnnnnnnnnnnnnnnnnnnnnnnnnnnnnnnnnnnnnnnnnnnnnnnnnnnnnnnnnnnnnnnnnnnnnnnnnnnnnnnnnnnnnnnnnnnnnnnnnnnnnnnnnnnnnnnnnnnnnnnnnnnnnnnnnnnnnnnnnnnnnnnnnnnnnnnnnnnnnnnnnnnnnnnnnnnnnnnnnnnnnnnnnnnnnnnnnnnnnnnnnnnnnnnnnnnnnnnnnnnnnnnnnnnnnnnnnnnnnnnnnnnnnnnnnnnnnnnnnnnnnnnnnnnnnnnnnnnnnnnnnnnnnnnnnnnnnnnnnnnnnnnnnnnnnnnnnnnnnnnnnnnnnnnnnnnnnnnnnnnnnnnnnnnnnnnnnnnnnnnnnnnnnnnnnnnnnnnnnnnnnnnnnnnnnnnnnnnnnnnnnnnnnnnnnnnnnnnnnnnnnnnnnnnnnnnnnnnnnnnnnnnnnnnnnnnnnnnnnnnnnnnnnnnnnnnnnnnnnnnnnnnnnnnnnnnnnnnnnnnnnnnnnnnnnnnnnnnnnnnnnnnnnnnnnnnnnnnnnnnnnnnnnnnnnnnnnnnnnnnnnnnnnnnnnnnnnnnnnnnnnnnnnnnnnnnnnnnnnnnnnnnnnnnnnnnnnnnnnnnnnnnnnnnnnnnnnnnnnnnnnnnnnnnnnnnnnnnnnnnnnnnnnnnnnnnnnnnnnnnnnnnnnnnnnnnnnnnnnnnnnnnnnnnnnnnnnnnnnnnnnnnnnnnnnnnnnnnnnnnnnnnnnnnnnnnnnnnnnnnnnnnnnnnnnnnnnnnnnnnnnnnnnnnnnnnnnnnnnnnnnnnnnnnnnnnnnnnnnnnnnnnnnnnnnnnnnnnnnnnnnnnnnnnnnnnnnnnnnnnnnnnnnnnnnnnnnnnnnnnnnnnnnnnnnnnnnnnnnnnnnnnnnnnnnnnnnnnnnnnnnnnnnnnnnnnnnnnnnnnnnnnnnnnnnnnnnnnnnnnnnnnnnnnnnnnnnnnnnnnnnnnnnnnnnnnnnnnnnnnnnnnnnnnnnnnnnnnnnnnnnnnnnnnnnnnnnnnnnnnnnnnnnnnnnnnnnnnnnnnnnnnnnnnnnnnnnnnnnnnnnnnnnnnnnnnnnnnnnnnnnnnnnnnnnnnnnnnnnnnnnnnnnnnnnnnnnnnnnnnnnnnnnnnnnnnnnnnnnnnnnnnnnnnnnnnnnnnnnnnnnnnnnnnnnnnnnnnnnnnnnnnnnnnnnnnnnnnnnnnnnnnnnnnnnnnnnnnnnnnnnnnnnnnnnnnnnnnnnnnnnnnnnnnnnnnnnnnnnnnnnnnnnnnnnnnnnnnnnnnnnnnnnnnnnnnnnnnnnnnnnnnnnnnnnnnnnnnnnnnnnnnnnnnnnnnnnnnnnnnnnnnnnnnnnnnnnnnnnnnnnnnnnnnnnnnnnnnnnnnnnnnnnnnnnnnnnnnnnnnnnnnnnnnnnnnnnnnnnnnnnnnnnnnnnnnnnnnnnnnnnnnnnnnnnnnnnnnnnnnnnnnnnnnnnnnnnnnnnnnnnnnnnnnnnnnnnnnnnnnnnnnnnnnnnnnnnnnnnnnnnnnnnnnnnnnnnnnnnnnnnnnnnnnnnnnnnnnnnnnnnnnnnnnnnnnnnnnnnnnnnnnnnnnnnnnnnnnnnnnnnnnnnnnnnnnnnnnnnnnnnnnnnnnnnnnnnnnnnnnnnnnnnnnnnnnnnnnnnnnnnnnnnnnnnnnnnnnnnnnnnnnnnnnnnnnnnnnnnnnnnnnnnnnnnnnnnnnnnnnnnnnnnnnnnnnnnnnnnnnnnnnnnnnnnnnnnnnnnnnnnnnnnnnnnnnnnnnnnnnnnnnnnnnnnnnnnnnnnnnnnnnnnnnnnnnnnnnnnnnnnnnnnnnnnnnnnnnnnnnnnnnnnnnnnnnnnnnnnnnnnnnnnnnnnnnnnnnnnnnnnnnnnnnnnnnnnnnnnnnnnnnnnnnnnnnnnnnnnnnnnnnnnnnnnnnnnnnnnnnnnnnnnnnnnnnnnnnnnnnnnnnnnnnnnnnnnnnnnnnnnnnnnnnnnnnnnnnnnnnnnnnnnnnnnnnnnnnnnnnnnnnnnnnnnnnnnnnnnnnnnnnnnnnnnnnnnnnnnnnnnnnnnnnnnnnnnnnnnnnnnnnnnnnnnnnnnnnnnnnnnnnnnnnnnnnnnnnnnnnnnnnnnnnnnnnnnnnnnnnnnnnnnnnnnnnnnnnnnnnnnnnnnnnnnnnnnnnnnnnnnnnnnnnnnnnnnnnnnnnnnnnnnnnnnnnnnnnnnnnnnnnnnnnnnnnnnnnnnnnnnnnnnnnnnnnnnnnnnnnnnnnnnnnnnnnnnnnnnnnnnnnnnnnnnnnnnnnnnnnnnnnnnnnnnnnnnnnnnnnnnnnnnnnnnnnnnnnnnnnnnnnnnnnnnnnnnnnnnnnnnnnnnnnnnnnnnnnnnnnnnnnnnnnnnnnnnnnnnnnnnnnnnnnnnnnnnnnnnnnnnnnnnnnnnnnnnnnnnnnnnnnnnnnnnnnnnnnnnnnnnnnnnnnnnnnnnnnnnnnnnnnnnnnnnnnnnnnnnnnnnnnnnnnnnnnnnnnnnnnnnnnnnnnnnnnnnnnnnnnnnnnnnnnnnnnnnnnnnnnnnnnnnnnnnnnnnnnnnnnnnnnnnnnnnnnnnnnnnnnnnnnnnnnnnnnnnnnnnnnnnnnnnnnnnnnnnnnnnnnnnnnnnnnnnnnnnnnnnnnnnnnnnnnnnnnnnnnnnnnnnnnnnnnnnnnnnnnnnnnnnnnnnnnnnnnnnnnnnnnnnnnnnnnnnnnnnnnnnnnnnnnnnnnnnnnnnnnnnnnnnnnnnnnnnnnnnnnnnnnnnnnnnnnnnnnnnnnnnnnnnnnnnnnnnnnnnnnnnnnnnnnnnnnnnnnnnnnnnnnnnnnnnnnnnnnnnnnnnnnnnnnnnnnnnnnnnnnnnnnnnnnnnnnnnnnnnnnnnnnnnnnnnnnnnnnnnnnnnnnnnnnnnnnnnnnnnnnnnnnnnnnnnnnnnnnnnnnnnnnnnnnnnnnnnnnnnnnnnnnnnnnnnnnnnnnnnnnnnnnnnnnnnnnnnnnnnnnnnnnnnnnnnnnnnnnnnnnnnnnnnnnnnnnnnnnnnnnnnnnnnnnnnnnnnnnnnnnnnnnnnnnnnnnnnnnnnnnnnnnnnnnnnnnnnnnnnnnnnnnnnnnnnnnnnnnnnnnnnnnnnnnnnnnnnnnnnnnnnnnnnnnnnnnnnnnnnnnnnnnnnnnnnnnnnnnnnnnnnnnnnnnnnnnnnnnnnnnnnnnnnnnnnnnnnnnnnnnnnnnnnnnnnnnnnnnnnnnnnnnnnnnnnnnnnnnnnnnnnnnnnnnnnnnnnnnnnnnnnnnnnnnnnnnnnnnnnnnnnnnnnnnnnnnnnnnnnnnnnnnnnnnnnnnnnnnnnnnnnnnnnnnnnnnnnnnnnnnnnnnnnnnnnnnnnnnnnnnnnnnnnnnnnnnnnnnnnnnnnnnnnnnnnnnnnnnnnnnnnnnnnnnnnnnnnnnnnnnnnnnnnnnnnnnnnnnnnnnnnnnnnnnnnnnnnnnnnnnnnnnnnnnnnnnnnnnnnnnnnnnnnnnnnnnnnnnnnnnnnnnnnnnnnnnnnnnnnnnnnnnnnnnnnnnnnnnnnnnnnnnnnnnnnnnnnnnnnnnnnnnnnnnnnnnnnnnnnnnnnnnnnnnnnnnnnnnnnnnnnnnnnnnnnnnnnnnnnnnnnnnnnnnnnnnnnnnnnnnnnnnnnnnnnnnnnnnnnnnnnnnnnnnnnnnnnnnnnnnnnnnnnnnnnnnnnnnnnnnnnnnnnnnnnnnnnnnnnnnnnnnnnnnnnnnnnnnnnnnnnnnnnnnnnnnnnnnnnnnnnnnnnnnnnnnnnnnnnnnnnnnnnnnnnnnnnnnnnnnnnnnnnnnnnnnnnnnnnnnnnnnnnnnnnnnnnnnnnnnnnnnnnnnnnnnnnnnnnnnnnnnnnnnnnnnnnnnnnnnnnnnnnnnnnnnnnnnnnnnnnnnnnnnnnnnnnnnnnnnnnnnnnnnnnnnnnnnnnnnnnnnnnnnnnnnnnnnnnnnnnnnnnnnnnnnnnnnnnnnnnnnnnnnnnnnnnnnnnnnnnnnnnnnnnnnnnnnnnnnnnnnnnnnnnnnnnnnnnnnnnnnnnnnnnnnnnnnnnnnnnnnnnnnnnnnnnnnnnnnnnnnnnnnnnnnnnnnnnnnnnnnnnnnnnnnnnnnnnnnnnnnnnnnnnnnnnnnnnnnnnnnnnnnnnnnnnnnnnnnnnnnnnnnnnnnnnnnnnnnnnnnnnnnnnnnnnnnnnnnnnnnnnnnnnnnnnnnnnnnnnnnnnnnnnnnnnnnnnnnnnnnnnnnnnnnnnnnnnnnnnnnnnnnnnnnnnnnnnnnnnnnnnnnnnnnnnnnnnnnnnnnnnnnnnnnnnnnnnnnnnnnnnnnnnnnnnnnnnnnnnnnnnnnnnnnnnnnnnnnnnnnnnnnnnnnnnnnnnnnnnnnnnnnnnnnnnnnnnnnnnnnnnnnnnnnnnnnnnnnnnnnnnnnnnnnnnnnnnnnnnnnnnnnnnnnnnnnnnnnnnnnnnnnnnnnnnnnnnnnnnnnnnnnnnnnnnnnnnnnnnnnnnnnnnnnnnnnnnnnnnnnnnnnnnnnnnnnnnnnnnnnnnnnnnnnnnnnnnnnnnnnnnnnnnnnnnnnnnnnnnnnnnnnnnnnnnnnnnnnnnnnnnnnnnnnnnnnnnnnnnnnnnnnnnnnnnnnnnnnnnnnnnnnnnnnnnnnnnnnnnnnnnnnnnnnnnnnnnnnnnnnnnnnnnnnnnnnnnnnnnnnnnnnnnnnnnnnnnnnnnnnnnnnnnnnnnnnnnnnnnnnnnnnnnnnnnnnnnnnnnnnnnnnnnnnnnnnnnnnnnnnnnnnnnnnnnnnnnnnnnnnnnnnnnnnnnnnnnnnnnnnnnnnnnnnnnnnnnnnnnnnnnnnnnnnnnnnnnnnnnnnnnnnnnnnnnnnnnnnnnnnnnnnnnnnnnnnnnnnnnnnnnnnnnnnnnnnnnnnnnnnnnnnnnnnnnnnnnnnnnnnnnnnnnnnnnnnnnnnnnnnnnnnnnnnnnnnnnnnnnnnnnnnnnnnnnnnnnnnnnnnnnnnnnnnnnnnnnnnnnnnnnnnnnnnnnnnnnnnnnnnnnnnnnnnnnnnnnnnnnnnnnnnnnnnnnnnnnnnnnnnnnnnnnnnnnnnnnnnnnnnnnnnnnnnnnnnnnnnnnnnnnnnnnnnnnnnnnnnnnnnnnnnnnnnnnnnnnnnnnnnnnnnnnnnnnnnnnnnnnnnnnnnnnnnnnnnnnnnnnnnnnnnnnnnnnnnnnnnnnnnnnnnnnnnnnnnnnnnnnnnnnnnnnnnnnnnnnnnnnnnnnnnnnnnnnnnnnnnnnnnnnnnnnnnnnnnnnnnnnnnnnnnnnnnnnnnnnnnnnnnnnnnnnnnnnnnnnnnnnnnnnnnnnnnnnnnnnnnnnnnnnnnnnnnnnnnnnnnnnnnnnnnnnnnnnnnnnnnnnnnnnnnnnnnnnnnnnnnnnnnnnnnnnnnnnnnnnnnnnnnnnnnnnnnnnnnnnnnnnnnnnnnnnnnnnnnnnnnnnnnnnnnnnnnnnnnnnnnnnnnnnnnnnnnnnnnnnnnnnnnnnnnnnnnnnnnnnnnnnnnnnnnnnnnnnnnnnnnnnnnnnnnnnnnnnnnnnnnnnnnnnnnnnnnnnnnnnnnnnnnnnnnnnnnnnnnnnnnnnnnnnnnnnnnnnnnnnnnnnnnnnnnnnnnnnnnnnnnnnnnnnnnnnnnnnnnnnnnnnnnnnnnnnnnnnnnnnnnnnnnnnnnnnnnnnnnnnnnnnnnnnnnnnnnnnnnnnnnnnnnnnnnnnnnnnnnnnnnnnnnnnnnnnnnnnnnnnnnnnnnnnnnnnnnnnnnnnnnnnnnnnnnnnnnnnnnnnnnnnnnnnnnnnnnnnnnnnnnnnnnnnnnnnnnnnnnnnnnnnnnnnnnnnnnnnnnnnnnnnnnnnnnnnnnnnnnnnnnnnnnnnnnnnnnnnnnnnnnnnnnnnnnnnnnnnnnnnnnnnnnnnnnnnnnnnnnnnnnnnnnnnnnnnnnnnnnnnnnnnnnnnnnnnnnnnnnnnnnnnnnnnnnnnnnnnnnnnnnnnnnnnnnnnnnnnnnnnnnnnnnnnnnnnnnnnnnnnnnnnnnnnnnnnnnnnnnnnnnnnnnnnnnnnnnnnnnnnnnnnnnnnnnnnnnnnnnnnnnnnnnnnnnnnnnnnnnnnnnnnnnnnnnnnnnnnnnnnnnnnnnnnnnnnnnnnnnnnnnnnnnnnnnnnnnnnnnnnnnnnnnnnnnnnnnnnnnnnnnnnnnnnnnnnnnnnnnnnnnnnnnnnnnnnnnnnnnnnnnnnnnnnnnnnnnnnnnnnnnnnnnnnnnnnnnnnnnnnnnnnnnnnnnnnnnnnnnnnnnnnnnnnnnnnnnnnnnnnnnnnnnnnnnnnnnnnnnnnnnnnnnnnnnnnnnnnnnnnnnnnnnnnnnnnnnnnnnnnnnnnnnnnnnnnnnnnnnnnnnnnnnnnnnnnnnnnnnnnnnnnnnnnnnnnnnnnnnnnnnnnnnnnnnnnnnnnnnnnnnnnnnnnnnnnnnnnnnnnnnnnnnnnnnnnnnnnnnnnnnnnnnnnnnnnnnnnnnnnnnnnnnnnnnnnnnnnnnnnnnnnnnnnnnnnnnnnnnnnnnnnnnnnnnnnnnnnnnnnnnnnnnnnnnnnnnnnnnnnnnnnnnnnnnnnnnnnnnnnnnnnnnnnnnnnnnnnnnnnnnnnnnnnnnnnnnnnnnnnnnnnnnnnnnnnnnnnnnnnnnnnnnnnnnnnnnnnnnnnnnnnnnnnnnnnnnnnnnnnnnnnnnnnnnnnnnnnnnnnnnnnnnnnnnnnnnnnnnnnnnnnnnnnnnnnnnnnnnnnnnnnnnnnnnnnnnnnnnnnnnnnnnnnnnnnnnnnnnnnnnnnnnnnnnnnnnnnnnnnnnnnnnnnnnnnnnnnnnnnnnnnnnnnnnnnnnnnnnnnnnnnnnnnnnnnnnnnnnnnnnnnnnnnnnnnnnnnnnnnnnnnnnnnnnnnnnnnnnnnnnnnnnnnnnnnnnnnnnnnnnnnnnnnnnnnnnnnnnnnnnnnnnnnnnnnnnnnnnnnnnnnnnnnnnnnnnnnnnnnnnnnnnnnnnnnnnnnnnnnnnnnnnnnnnnnnnnnnnnnnnnnnnnnnnnnnnnnnnnnnnnnnnnnnnnnnnnnnnnnnnnnnnnnnnnnnnnnnnnnnnnnnnnnnnnnnnnnnnnnnnnnnnnnnnnnnnnnnnnnnnnnnnnnnnnnnnnnnnnnnnnnnnnnnnnnnnnnnnnnnnnnnnnnnnnnnnnnnnnnnnnnnnnnnnnnnnnnnnnnnnnnnnnnnnnnnnnnnnnnnnnnnnnnnnnnnnnnnnnnnnnnnnnnnnnnnnnnnnnnnnnnnnnnnnnnnnnnnnnnnnnnnnnnnnnnnnnnnnnnnnnnnnnnnnnnnnnnnnnnnnnnnnnnnnnnnnnnnnnnnnnnnnnnnnnnnnnnnnnnnnnnnnnnnnnnnnnnnnnnnnnnnnnnnnnnnnnnnnnnnnnnnnnnnnnnnnnnnnnnnnnnnnnnnnnnnnnnnnnnnnnnnnnnnnnnnnnnnnnnnnnnnnnnnnnnnnnnnnnnnnnnnnnnnnnnnnnnnnnnnnnnnnnnnnnnnnnnnnnnnnnnnnnnnnnnnnnnnnnnnnnnnnnnnnnnnnnnnnnnnnnnnnnnnnnnnnnnnnnnnnnnnnnnnnnnnnnnnnnnnnnnnnnnnnnnnnnnnnnnnnnnnnnnnnnnnnnnnnnnnnnnnnnnnnnnnnnnnnnnnnnnnnnnnnnnnnnnnnnnnnnnnnnnnnnnnnnnnnnnnnnnnnnnnnnnnnnnnnnnnnnnnnnnnnnnnnnnnnnnnnnnnnnnnnnnnnnnnnnnnnnnnnnnnnnnnnnnnnnnnnnnnnnnnnnnnnnnnnnnnnnnnnnnnnnnnnnnnnnnnnnnnnnnnnnnnnnnnnnnnnnnnnnnnnnnnnnnnnnnnnnnnnnnnnnnnnnnnnnnnnnnnnnnnnnnnnnnnnnnnnnnnnnnnnnnnnnnnnnnnnnnnnnnnnnnnnnnnnnnnnnnnnnnnnnnnnnnnnnnnnnnnnnnnnnnnnnnnnnnnnnnnnnnnnnnnnnnnnnnnnnnnnnnnnnnnnnnnnnnnnnnnnnnnnnnnnnnnnnnnnnnnnnnnnnnnnnnnnnnnnnnnnnnnnnnnnnnnnnnnnnnnnnnnnnnnnnnnnnnnnnnnnnnnnnnnnnnnnnnnnnnnnnnnnnnnnnnnnnnnnnnnnnnnnnnnnnnnnnnnnnnnnnnnnnnnnnnnnnnnnnnnnnnnnnnnnnnnnnnnnnnnnnnnnnnnnnnnnnnnnnnnnnnnnnnnnnnnnnnnnnnnnnnnnnnnnnnnnnnnnnnnnnnnnnnnnnnnnnnnnnnnnnnnnnnnnnnnnnnnnnnnnnnnnnnnnnnnnnnnnnnnnnnnnnnnnnnnnnnnnnnnnnnnnnnnnnnnnnnnnnnnnnnnnnnnnnnnnnnnnnnnnnnnnnnnnnnnnnnnnnnnnnnnnnnnnnnnnnnnnnnnnnnnnnnnnnnnnnnnnnnnnnnnnnnnnnnnnnnnnnnnnnnnnnnnnnnnnnnnnnnnnnnnnnnnnnnnnnnnnnnnnnnnnnnnnnnnnnnnnnnnnnnnnnnnnnnnnnnnnnnnnnnnnnnnnnnnnnnnnnnnnnnnnnnnnnnnnnnnnnnnnnnnnnnnnnnnnnnnnnnnnnnnnnnnnnnnnnnnnnnnnnnnnnnnnnnnnnnnnnnnnnnnnnnnnnnnnnnnnnnnnnnnnnnnnnnnnnnnnnnnnnnnnnnnnnnnnnnnnnnnnnnnnnnnnnnnnnnnnnnnnnnnnnnnnnnnnnnnnnnnnnnnnnnnnnnnnnnnnnnnnnnnnnnnnnnnnnnnnnnnnnnnnnnnnnnnnnnnnnnnnnnnnnnnnnnnnnnnnnnnnnnnnnnnnnnnnnnnnnnnnnnnnnnnnnnnnnnnnnnnnnnnnnnnnnnnnnnnnnnnnnnnnnnnnnnnnnnnnnnnnnnnnnnnnnnnnnnnnnnnnnnnnnnnnnnnnnnnnnnnnnnnnnnnnnnnnnnnnnnnnnnnnnnnnnnnnnnnnnnnnnnnnnnnnnnnnnnnnnnnnnnnnnnnnnnnnnnnnnnnnnnnnnnnnnnnnnnnnnnnnnnnnnnnnnnnnnnnnnnnnnnnnnnnnnnnnnnnnnnnnnnnnnnnnnnnnnnnnnnnnnnnnnnnnnnnnnnnnnnnnnnnnnnnnnnnnnnnnnnnnnnnnnnnnnnnnnnnnnnnnnnnnnnnnnnnnnnnnnnnnnnnnnnnnnnnnnnnnnnnnnnnnnnnnnnnnnnnnnnnnnnnnnnnnnnnnnnnnnnnnnnnnnnnnnnnnnnnnnnnnnnnnnnnnnnnnnnnnnnnnnnnnnnnnnnnnnnnnnnnnnnnnnnnnnnnnnnnnnnnnnnnnnnnnnnnnnnnnnnnnnnnnnnnnnnnnnnnnnnnnnnnnnnnnnnnnnnnnnnnnnnnnnnnnnnnnnnnnnnnnnnnnnnnnnnnnnnnnnnnnnnnnnnnnnnnnnnnnnnnnnnnnnnnnnnnnnnnnnnnnnnnnnnnnnnnnnnnnnnnnnnnnnnnnnnnnnnnnnnnnnnnnnnnnnnnnnnnnnnnnnnnnnnnnnnnnnnnnnnnnnnnnnnnnnnnnnnnnnnnnnnnnnnnnnnnnnnnnnnnnnnnnnnnnnnnnnnnnnnnnnnnnnnnnnnnnnnnnnnnnnnnnnnnnnnnnnnnnnnnnnnnnnnnnnnnnnnnnnnnnnnnnnnnnnnnnnnnnnnnnnnnnnnnnnnnnnnnnnnnnnnnnnnnnnnnnnnnnnnnnnnnnnnnnnnnnnnnnnnnnnnnnnnnnnnnnnnnnnnnnnnnnnnnnnnnnnnnnnnnnnnnnnnnnnnnnnnnnnnnnnnnnnnnnnnnnnnnnnnnnnnnnnnnnnnnnnnnnnnnnnnnnnnnnnnnnnnnnnnnnnnnnnnnnnnnnnnnnnnnnnnnnnnnnnnnnnnnnnnnnnnnnnnnnnnnnnnnnnnnnnnnnnnnnnnnnnnnnnnnnnnnnnnnnnnnnnnnnnnnnnnnnnnnnnnnnnnnnnnnnnnnnnnnnnnnnnnnnnnnnnnnnnnnnnnnnnnnnnnnnnnnnnnnnnnnnnnnnnnnnnnnnnnnnnnnnnnnnnnnnnnnnnnnnnnnnnnnnnnnnnnnnnnnnnnnnnnnnnnnnnnnnnnnnnnnnnnnnnnnnnnnnnnnnnnnnnnnnnnnnnnnnnnnnnnnnnnnnnnnnnnnnnnnnnnnnnnnnnnnnnnnnnnnnnnnnnnnnnnnnnnnnnnnnnnnnnnnnnnnnnnnnnnnnnnnnnnnnnnnnnnnnnnnnnnnnnnnnnnnnnnnnnnnnnnnnnnnnnnnnnnnnnnnnnnnnnnnnnnnnnnnnnnnnnnnnnnnnnnnnnnnnnnnnnnnnnnnnnnnnnnnnnnnnnnnnnnnnnnnnnnnnnnnnnnnnnnnnnnnnnnnnnnnnnnnnnnnnnnnnnnnnnnnnnnnnnnnnnnnnnnnnnnnnnnnnnnnnnnnnnnnnnnnnnnnnnnnnnnnnnnnnnnnnnnnnnnnnnnnnnnnnnnnnnnnnnnnnnnnnnnnnnnnnnnnnnnnnnnnnnnnnnnnnnnnnnnnnnnnnnnnnnnnnnnnnnnnnnnnnnnnnnnnnnnnnnnnnnnnnnnnnnnnnnnnnnnnnnnnnnnnnnnnnnnnnnnnnnnnnnnnnnnnnnnnnnnnnnnnnnnnnnnnnnnnnnnnnnnnnnnnnnnnnnnnnnnnnnnnnnnnnnnnnnnnnnnnnnnnnnnnnnnnnnnnnnnnnnnnnnnnnnnnnnnnnnnnnnnnnnnnnnnnnnnnnnnnnnnnnnnnnnnnnnnnnnnnnnnnnnnnnnnnnnnnnnnnnnnnnnnnnnnnnnnnnnnnnnnnnnnnnnnnnnnnnnnnnnnnnnnnnnnnnnnnnnnnnnnnnnnnnnnnnnnnnnnnnnnnnnnnnnnnnnnnnnnnnnnnnnnnnnnnnnnnnnnnnnnnnnnnnnnnnnnnnnnnnnnnnnnnnnnnnnnnnnnnnnnnnnnnnnnnnnnnnnnnnnnnnnnnnnnnnnnnnnnnnnnnnnnnnnnnnnnnnnnnnnnnnnnnnnnnnnnnnnnnnnnnnnnnnnnnnnnnnnnnnnnnnnnnnnnnnnnnnnnnnnnnnnnnnnnnnnnnnnnnnnnnnnnnnnnnnnnnnnnnnnnnnnnnnnnnnnnnnnnnnnnnnnnnnnnnnnnnnnnnnnnnnnnnnnnnnnnnnnnnnnnnnnnnnnnnnnnnnnnnnnnnnnnnnnnnnnnnnnnnnnnnnnnnnnnnnnnnnnnnnnnnnnnnnnnnnnnnnnnnnnnnnnnnnnnnnnnnnnnnnnnnnnnnnnnnnnnnnnnnnnnnnnnnnnnnnnnnnnnnnnnnnnnnnnnnnnnnnnnnnnnnnnnnnnnnnnnnnnnnnnnnnnnnnnnnnnnnnnnnnnnnnnnnnnnnnnnnnnnnnnnnnnnnnnnnnnnnnnnnnnnnnnnnnnnnnnnnnnnnnnnnnnnnnnnnnnnnnnnnnnnnnnnnnnnnnnnnnnnnnnnnnnnnnnnnnnnnnnnnnnnnnnnnnnnnnnnnnnnnnnnnnnnnnnnnnnnnnnnnnnnnnnnnnnnnnnnnnnnnnnnnnnnnnnnnnnnnnnnnnnnnnnnnnnnnnnnnnnnnnnnnnnnnnnnnnnnnnnnnnnnnnnnnnnnnnnnnnnnnnnnnnnnnnnnnnnnnnnnnnnnnnnnnnnnnnnnnnnnnnnnnnnnnnnnnnnnnnnnnnnnnnnnnnnnnnnnnnnnnnnnnnnnnnnnnnnnnnnnnnnnnnnnnnnnnnnnnnnnnnnnnnnnnnnnnnnnnnnnnnnnnnnnnnnnnnnnnnnnnnnnnnnnnnnnnnnnnnnnnnnnnnnnnnnnnnnnnnnnnnnnnnnnnnnnnnnnnnnnnnnnnnnnnnnnnnnnnnnnnnnnnnnnnnnnnnnnnnnnnnnnnnnnnnnnnnnnnnnnnnnnnnnnnnnnnnnnnnnnnnnnnnnnnnnnnnnnnnnnnnnnnnnnnnnnnnnnnnnnnnnnnnnnnnnnnnnnnnnnnnnnnnnnnnnnnnnnnnnnnnnnnnnnnnnnnnnnnnnnnnnnnnnnnnnnnnnnnnnnnnnnnnnnnnnnnnnnnnnnnnnnnnnnnnnnnnnnnnnnnnnnnnnnnnnnnnnnnnnnnnnnnnnnnnnnnnnnnnnnnnnnnnnnnnnnnnnnnnnnnnnnnnnnnnnnnnnnnnnnnnnnnnnnnnnnnnnnnnnnnnnnnnnnnnnnnnnnnnnnnnnnnnnnnnnnnnnnnnnnnnnnnnnnnnnnnnnnnnnnnnnnnnnnnnnnnnnnnnnnnnnnnnnnnnnnnnnnnnnnnnnnnnnnnnnnnnnnnnnnnnnnnnnnnnnnnnnnnnnnnnnnnnnnnnnnnnnnnnnnnnnnnnnnnnnnnnnnnnnnnnnnnnnnnnnnnnnnnnnnnnnnnnnnnnnnnnnnnnnnnnnnnnnnnnnnnnnnnnnnnnnnnnnnnnnnnnnnnnnnnnnnnnnnnnnnnnnnnnnnnnnnnnnnnnnnnnnnnnnnnnnnnnnnnnnnnnnnnnnnnnnnnnnnnnnnnnnnnnnnnnnnnnnnnnnnnnnnnnnnnnnnnnnnnnnnnnnnnnnnnnnnnnnnnnnnnnnnnnnnnnnnnnnnnnnnnnnnnnnnnnnnnnnnnnnnnnnnnnnnnnnnnnnnnnnnnnnnnnnnnnnnnnnnnnnnnnnnnnnnnnnnnnnnnnnnnnnnnnnnnnnnnnnnnnnnnnnnnnnnnnnnnnnnnnnnnnnnnnnnnnnnnnnnnnnnnnnnnnnnnnnnnnnnnnnnnnnnnnnnnnnnnnnnnnnnnnnnnnnnnnnnnnnnnnnnnnnnnnnnnnnnnnnnnnnnnnnnnnnnnnnnnnnnnnnnnnnnnnnnnnnnnnnnnnnnnnnnnnnnnnnnnnnnnnnnnnnnnnnnnnnnnnnnnnnnnnnnnnnnnnnnnnnnnnnnnnnnnnnnnnnnnnnnnnnnnnnnnnnnnnnnnnnnnnnnnnnnnnnnnnnnnnnnnnnnnnnnnnnnnnnnnnnnnnnnnnnnnnnnnnnnnnnnnnnnnnnnnnnnnnnnnnnnnnnnnnnnnnnnnnnnnnnnnnnnnnnnnnnnnnnnnnnnnnnnnnnnnnnnnnnnnnnnnnnnnnnnnnnnnnnnnnnnnnnnnnnnnnnnnnnnnnnnnnnnnnnnnnnnnnnnnnnnnnnnnnnnnnnnnnnnnnnnnnnnnnnnnnnnnnnnnnnnnnnnnnnnnnnnnnnnnnnnnnnnnnnnnnnnnnnnnnnnnnnnnnnnnnnnnnnnnnnnnnnnnnnnnnnnnnnnnnnnnnnnnnnnnnnnnnnnnnnnnnnnnnnnnnnnnnnnnnnnnnnnnnnnnnnnnnnnnnnnnnnnnnnnnnnnnnnnnnnnnnnnnnnnnnnnnnnnnnnnnnnnnnnnnnnnnnnnnnnnnnnnnnnnnnnnnnnnnnnnnnnnnnnnnnnnnnnnnnnnnnnnnnnnnnnnnnnnnnnnnnnnnnnnnnnnnnnnnnnnnnnnnnnnnnnnnnnnnnnnnnnnnnnnnnnnnnnnnnnnnnnnnnnnnnnnnnnnnnnnnnnnnnnnnnnnnnnnnnnnnnnnnnnnnnnnnnnnnnnnnnnnnnnnnnnnnnnnnnnnnnnnnnnnnnnnnnnnnnnnnnnnnnnnnnnnnnnnnnnnnnnnnnnnnnnnnnnnnnnnnnnnnnnnnnnnnnnnnnnnnnnnnnnnnnnnnnnnnnnnnnnnnnnnnnnnnnnnnnnnnnnnnnnnnnnnnnnnnnnnnnnnnnnnnnnnnnnnnnnnnnnnnnnnnnnnnnnnnnnnnnnnnnnnnnnnnnnnnnnnnnnnnnnnnnnnnnnnnnnnnnnnnnnnnnnnnnnnnnnnnnnnnnnnnnnnnnnnnnnnnnnnnnnnnnnnnnnnnnnnnnnnnnnnnnnnnnnnnnnnnnnnnnnnnnnnnnnnnnnnnnnnnnnnnnnnnnnnnnnnnnnnnnnnnnnnnnnnnnnnnnnnnnnnnnnnnnnnnnnnnnnnnnnnnnnnnnnnnnnnnnnnnnnnnnnnnnnnnnnnnnnnnnnnnnnnnnnnnnnnnnnnnnnnnnnnnnnnnnnnnnnnnnnnnnnnnnnnnnnnnnnnnnnnnnnnnnnnnnnnnnnnnnnnnnnnnnnnnnnnnnnnnnnnnnnnnnnnnnnnnnnnnnnnnnnnnnnnnnnnnnnnnnnnnnnnnnnnnnnnnnnnnnnnnnnnnnnnnnnnnnnnnnnnnnnnnnnnnnnnnnnnnnnnnnnnnnnnnnnnnnnnnnnnnnnnnnnnnnnnnnnnnnnnnnnnnnnnnnnnnnnnnnnnnnnnnnnnnnnnnnnnnnnnnnnnnnnnnnnnnnnnnnnnnnnnnnnnnnnnnnnnnnnnnnnnnnnnnnnnnnnnnnnnnnnnnnnnnnnnnnnnnnnnnnnnnnnnnnnnnnnnnnnnnnnnnnnnnnnnnnnnnnnnnnnnnnnnnnnnnnnnnnnnnnnnnnnnnnnnnnnnnnnnnnnnnnnnnnnnnnnnnnnnnnnnnnnnnnnnnnnnnnnnnnnnnnnnnnnnnnnnnnnnnnnnnnnnnnnnnnnnnnnnnnnnnnnnnnnnnnnnnnnnnnnnnnnnnnnnnnnnnnnnnnnnnnnnnnnnnnnnnnnnnnnnnnnnnnnnnnnnnnnnnnnnnnnnnnnnnnnnnnnnnnnnnnnnnnnnnnnnnnnnnnnnnnnnnnnnnnnnnnnnnnnnnnnnnnnnnnnnnnnnnnnnnnnnnnnnnnnnnnnnnnnnnnnnnnnnnnnnnnnnnnnnnnnnnnnnnnnnnnnnnnnnnnnnnnnnnnnnnnnnnnnnnnnnnnnnnnnnnnnnnnnnnnnnnnnnnnnnnnnnnnnnnnnnnnnnnnnnnnnnnnnnnnnnnnnnnnnnnnnnnnnnnnnnnnnnnnnnnnnnnnnnnnnnnnnnnnnnnnnnnnnnnnnnnnnnnnnnnnnnnnnnnnnnnnnnnnnnnnnnnnnnnnnnnnnnnnnnnnnnnnnnnnnnnnnnnnnnnnnnnnnnnnnnnnnnnnnnnnnnnnnnnnnnnnnnnnnnnnnnnnnnnnnnnnnnnnnnnnnnnnnnnnnnnnnnnnnnnnnnnnnnnnnnnnnnnnnnnnnnnnnnnnnnnnnnnnnnnnnnnnnnnnnnnnnnnnnnnnnnnnnnnnnnnnnnnnnnnnnnnnnnnnnnnnnnnnnnnnnnnnnnnnnnnnnnnnnnnnnnnnnnnnnnnnnnnnnnnnnnnnnnnnnnnnnnnnnnnnnnnnnnnnnnnnnnnnnnnnnnnnnnnnnnnnnnnnnnnnnnnnnnnnnnnnnnnnnnnnnnnnnnnnnnnnnnnnnnnnnnnnnnnnnnnnnnnnnnnnnnnnnnnnnnnnnnnnnnnnnnnnnnnnnnnnnnnnnnnnnnnnnnnnnnnnnnnnnnnnnnnnnnnnnnnnnnnnnnnnnnnnnnnnnnnnnnnnnnnnnnnnnnnnnnnnnnnnnnnnnnnnnnnnnnnnnnnnnnnnnnnnnnnnnnnnnnnnnnnnnnnnnnnnnnnnnnnnnnnnnnnnnnnnnnnnnnnnnnnnnnnnnnnnnnnnnnnnnnnnnnnnnnnnnnnnnnnnnnnnnnnnnnnnnnnnnnnnnnnnnnnnnnnnnnnnnnnnnnnnnnnnnnnnnnnnnnnnnnnnnnnnnnnnnnnnnnnnnnnnnnnnnnnnnnnnnnnnnnnnnnnnnnnnnnnnnnnnnnnnnnnnnnnnnnnnnnnnnnnnnnnnnnnnnnnnnnnnnnnnnnnnnnnnnnnnnnnnnnnnnnnnnnnnnnnnnnnnnnnnnnnnnnnnnnnnnnnnnnnnnnnnnnnnnnnnnnnnnnnnnnnnnnnnnnnnnnnnnnnnnnnnnnnnnnnnnnnnnnnnnnnnnnnnnnnnnnnnnnnnnnnnnnnnnnnnnnnnnnnnnnnnnnnnnnnnnnnnnnnnnnnnnnnnnnnnnnnnnnnnnnnnnnnnnnnnnnnnnnnnnnnnnnnnnnnnnnnnnnnnnnnnnnnnnnnnnnnnnnnnnnnnnnnnnnnnnnnnnnnnnnnnnnnnnnnnnnnnnnnnnnnnnnnnnnnnnnnnnnnnnnnnnnnnnnnnnnnnnnnnnnnnnnnnnnnnnnnnnnnnnnnnnnnnnnnnnnnnnnnnnnnnnnnnnnnnnnnnnnnnnnnnnnnnnnnnnnnnnnnnnnnnnnnnnnnnnnnnnnnnnnnnnnnnnnnnnnnnnnnnnnnnnnnnnnnnnnnnnnnnnnnnnnnnnnnnnnnnnnnnnnnnnnnnnnnnnnnnnnnnnnnnnnnnnnnnnnnnnnnnnnnnnnnnnnnnnnnnnnnnnnnnnnnnnnnnnnnnnnnnnnnnnnnnnnnnnnnnnnnnnnnnnnnnnnnnnnnnnnnnnnnnnnnnnnnnnnnnnnnnnnnnnnnnnnnnnnnnnnnnnnnnnnnnnnnnnnnnnnnnnnnnnnnnnnnnnnnnnnnnnnnnnnnnnnnnnnnnnnnnnnnnnnnnnnnnnnnnnnnnnnnnnnnnnnnnnnnnnnnnnnnnnnnnnnnnnnnnnnnnnnnnnnnnnnnnnnnnnnnnnnnnnnnnnnnnnnnnnnnnnnnnnnnnnnnnnnnnnnnnnnnnnnnnnnnnnnnnnnnnnnnnnnnnnnnnnnnnnnnnnnnnnnnnnnnnnnnnnnnnnnnnnnnnnnnnnnnnnnnnnnnnnnnnnnnnnnnnnnnnnnnnnnnnnnnnnnnnnnnnnnnnnnnnnnnnnnnnnnnnnnnnnnnnnnnnnnnnnnnnnnnnnnnnnnnnnnnnnnnnnnnnnnnnnnnnnnnnnnnnnnnnnnnnnnnnnnnnnnnnnnnnnnnnnnnnnnnnnnnnnnnnnnnnnnnnnnnnnnnnnnnnnnnnnnnnnnnnnnnnnnnnnnnnnnnnnnnnnnnnnnnnnnnnnnnnnnnnnnnnnnnnnnnnnnnnnnnnnnnnnnnnnnnnnnnnnnnnnnnnnnnnnnnnnnnnnnnnnnnnnnnnnnnnnnnnnnnnnnnnnnnnnnnnnnnnnnnnnnnnnnnnnnnnnnnnnnnnnnnnnnnnnnnnnnnnnnnnnnnnnnnnnnnnnnnnnnnnnnnnnnnnnnnnnnnnnnnnnnnnnnnnnnnnnnnnnnnnnnnnnnnnnnnnnnnnnnnnnnnnnnnnnnnnnnnnnnnnnnnnnnnnnnnnnnnnnnnnnnnnnnnnnnnnnnnnnnnnnnnnnnnnnnnnnnnnnnnnnnnnnnnnnnnnnnnnnnnnnnnnnnnnnnnnnnnnnnnnnnnnnnnnnnnnnnnnnnnnnnnnnnnnnnnnnnnnnnnnnnnnnnnnnnnnnnnnnnnnnnnnnnnnnnnnnnnnnnnnnnnnnnnnnnnnnnnnnnnnnnnnnnnnnnnnnnnnnnnnnnnnnnnnnnnnnnnnnnnnnnnnnnnnnnnnnnnnnnnnnnnnnnnnnnnnnnnnnnnnnnnnnnnnnnnnnnnnnnnnnnnnnnnnnnnnnnnnnnnnnnnnnnnnnnnnnnnnnnnnnnnnnnnnnnnnnnnnnnnnnnnnnnnnnnnnnnnnnnnnnnnnnnnnnnnnnnnnnnnnnnnnnnnnnnnnnnnnnnnnnnnnnnnnnnnnnnnnnnnnnnnnnnnnnnnnnnnnnnnnnnnnnnnnnnnnnnnnnnnnnnnnnnnnnnnnnnnnnnnnnnnnnnnnnnnnnnnnnnnnnnnnnnnnnnnnnnnnnnnnnnnnnnnnnnnnnnnnnnnnnnnnnnnnnnnnnnnnnnnnnnnnnnnnnnnnnnnnnnnnnnnnnnnnnnnnnnnnnnnnnnnnnnnnnnnnnnnnnnnnnnnnnnnnnnnnnnnnnnnnnnnnnnnnnnnnnnnnnnnnnnnnnnnnnnnnnnnnnnnnnnnnnnnnnnnnnnnnnnnnnnnnnnnnnnnnnnnnnnnnnnnnnnnnnnnnnnnnnnnnnnnnnnnnnnnnnnnnnnnnnnnnnnnnnnnnnnnnnnnnnnnnnnnnnnnnnnnnnnnnnnnnnnnnnnnnnnnnnnnnnnnnnnnnnnnnnnnnnnnnnnnnnnnnnnnnnnnnnnnnnnnnnnnnnnnnnnnnnnnnnnnnnnnnnnnnnnnnnnnnnnnnnnnnnnnnnnnnnnnnnnnnnnnnnnnnnnnnnnnnnnnnnnnnnnnnnnnnnnnnnnnnnnnnnnnnnnnnnnnnnnnnnnnnnnnnnnnnnnnnnnnnnnnnnnnnnnnnnnnnnnnnnnnnnnnnnnnnnnnnnnnnnnnnnnnnnnnnnnnnnnnnnnnnnnnnnnnnnnnnnnnnnnnnnnnnnnnnnnnnnnnnnnnnnnnnnnnnnnnnnnnnnnnnnnnnnnnnnnnnnnnnnnnnnnnnnnnnnnnnnnnnnnnnnnnnnnnnnnnnnnnnnnnnnnnnnnnnnnnnnnnnnnnnnnnnnnnnnnnnnnnnnnnnnnnnnnnnnnnnnnnnnnnnnnnnnnnnnnnnnnnnnnnnnnnnnnnnnnnnnnnnnnnnnnnnnnnnnnnnnnnnnnnnnnnnnnnnnnnnnnnnnnnnnnnnnnnnnnnnnnnnnnnnnnnnnnnnnnnnnnnnnnnnnnnnnnnnnnnnnnnnnnnnnnnnnnnnnnnnnnnnnnnnnnnnnnnnnnnnnnnnnnnnnnnnnnnnnnnnnnnnnnnnnnnnnnnnnnnnnnnnnnnnnnnnnnnnnnnnnnnnnnnnnnnnnnnnnnnnnnnnnnnnnnnnnnnnnnnnnnnnnnnnnnnnnnnnnnnnnnnnnnnnnnnnnnnnnnnnnnnnnnnnnnnnnnnnnnnnnnnnnnnnnnnnnnnnnnnnnnnnnnnnnnnnnnnnnnnnnnnnnnnnnnnnnnnnnnnnnnnnnnnnnnnnnnnnnnnnnnnnnnnnnnnnnnnnnnnnnnnnnnnnnnnnnnnnnnnnnnnnnnnnnnnnnnnnnnnnnnnnnnnnnnnnnnnnnnnnnnnnnnnnnnnnnnnnnnnnnnnnnnnnnnnnnnnnnnnnnnnnnnnnnnnnnnnnnnnnnnnnnnnnnnnnnnnnnnnnnnnnnnnnnnnnnnnnnnnnnnnnnnnnnnnnnnnnnnnnnnnnnnnnnnnnnnnnnnnnnnnnnnnnnnnnnnnnnnnnnnnnnnnnnnnnnnnnnnnnnnnnnnnnnnnnnnnnnnnnnnnnnnnnnnnnnnnnnnnnnnnnnnnnnnnnnnnnnnnnnnnnnnnnnnnnnnnnnnnnnnnnnnnnnnnnnnnnnnnnnnnnnnnnnnnnnnnnnnnnnnnnnnnnnnnnnnnnnnnnnnnnnnnnnnnnnnnnnnnnnnnnnnnnnnnnnnnnnnnnnnnnnnnnnnnnnnnnnnnnnnnnnnnnnnnnnnnnnnnnnnnnnnnnnnnnnnnnnnnnnnnnnnnnnnnnnnnnnnnnnnnnnnnnnnnnnnnnnnnnnnnnnnnnnnnnnnnnnnnnnnnnnnnnnnnnnnnnnnnnnnnnnnnnnnnnnnnnnnnnnnnnnnnnnnnnnnnnnnnnnnnnnnnnnnnnnnnnnnnnnnnnnnnnnnnnnnnnnnnnnnnnnnnnnnnnnnnnnnnnnnnnnnnnnnnnnnnnnnnnnnnnnnnnnnnnnnnnnnnnnnnnnnnnnnnnnnnnnnnnnnnnnnnnnnnnnnnnnnnnnnnnnnnnnnnnnnnnnnnnnnnnnnnnnnnnnnnnnnnnnnnnnnnnnnnnnnnnnnnnnnnnnnnnnnnnnnnnnnnnnnnnnnnnnnnnnnnnnnnnnnnnnnnnnnnnnnnnnnnnnnnnnnnnnnnnnnnnnnnnnnnnnnnnnnnnnnnnnnnnnnnnnnnnnnnnnnnnnnnnnnnnnnnnnnnnnnnnnnnnnnnnnnnnnnnnnnnnnnnnnnnnnnnnnnnnnnnnnnnnnnnnnnnnnnnnnnnnnnnnnnnnnnnnnnnnnnnnnnnnnnnnnnnnnnnnnnnnnnnnnnnnnnnnnnnnnnnnnnnnnnnnnnnnnnnnnnnnnnnnnnnnnnnnnnnnnnnnnnnnnnnnnnnnnnnnnnnnnnnnnnnnnnnnnnnnnnnnnnnnnnnnnnnnnnnnnnnnnnnnnnnnnnnnnnnnnnnnnnnnnnnnnnnnnnnnnnnnnnnnnnnnnnnnnnnnnnnnnnnnnnnnnnnnnnnnnnnnnnnnnnnnnnnnnnnnnnnnnnnnnnnnnnnnnnnnnnnnnnnnnnnnnnnnnnnnnnnnnnnnnnnnnnnnnnnnnnnnnnnnnnnnnnnnnnnnnnnnnnnnnnnnnnnnnnnnnnnnnnnnnnnnnnnnnnnnnnnnnnnnnnnnnnnnnnnnnnnnnnnnnnnnnnnnnnnnnnnnnnnnnnnnnnnnnnnnnnnnnnnnnnnnnnnnnnnnnnnnnnnnnnnnnnnnnnnnnnnnnnnnnnnnnnnnnnnnnnnnnnnnnnnnnnnnnnnnnnnnnnnnnnnnnnnnnnnnnnnnnnnnnnnnnnnnnnnnnnnnnnnnnnnnnnnnnnnnnnnnnnnnnnnnnnnnnnnnnnnnnnnnnnnnnnnnnnnnnnnnnnnnnnnnnnnnnnnnnnnnnnnnnnnnnnnnnnnnnnnnnnnnnnnnnnnnnnnnnnnnnnnnnnnnnnnnnnnnnnnnnnnnnnnnnnnnnnnnnnnnnnnnnnnnnnnnnnnnnnnnnnnnnnnnnnnnnnnnnnnnnnnnnnnnnnnnnnnnnnnnnnnnnnnnnnnnnnnnnnnnnnnnnnnnnnnnnnnnnnnnnnnnnnnnnnnnnnnnnnnnnnnnnnnnnnnnnnnnnnnnnnnnnnnnnnnnnnnnnnnnnnnnnnnnnnnnnnnnnnnnnnnnnnnnnnnnnnnnnnnnnnnnnnnnnnnnnnnnnnnnnnnnnnnnnnnnnnnnnnnnnnnnnnnnnnnnnnnnnnnnnnnnnnnnnnnnnnnnnnnnnnnnnnnnnnnnnnnnnnnnnnnnnnnnnnnnnnnnnnnnnnnnnnnnnnnnnnnnnnnnnnnnnnnnnnnnnnnnnnnnnnnnnnnnnnnnnnnnnnnnnnnnnnnnnnnnnnnnnnnnnnnnnnnnnnnnnnnnnnnnnnnnnnnnnnnnnnnnnnnnnnnnnnnnnnnnnnnnnnnnnnnnnnnnnnnnnnnnnnnnnnnnnnnnnnnnnnnnnnnnnnnnnnnnnnnnnnnnnnnnnnnnnnnnnnnnnnnnnnnnnnnnnnnnnnnnnnnnnnnnnnnnnnnnnnnnnnnnnnnnnnnnnnnnnnnnnnnnnnnnnnnnnnnnnnnnnnnnnnnnnnnnnnnnnnnnnnnnnnnnnnnnnnnnnnnnnnnnnnnnnnnnnnnnnnnnnnnnnnnnnnnnnnnnnnnnnnnnnnnnnnnnnnnnnnnnnnnnnnnnnnnnnnnnnnnnnnnnnnnnnnnnnnnnnnnnnnnnnnnnnnnnnnnnnnnnnnnnnnnnnnnnnnnnnnnnnnnnnnnnnnnnnnnnnnnnnnnnnnnnnnnnnnnnnnnnnnnnnnnnnnnnnnnnnnnnnnnnnnnnnnnnnnnnnnnnnnnnnnnnnnnnnnnnnnnnnnnnnnnnnnnnnnnnnnnnnnnnnnnnnnnnnnnnnnnnnnnnnnnnnnnnnnnnnnnnnnnnnnnnnnnnnnnnnnnnnnnnnnnnnnnnnnnnnnnnnnnnnnnnnnnnnnnnnnnnnnnnnnnnnnnnnnnnnnnnnnnnnnnnnnnnnnnnnnnnnnnnnnnnnnnnnnnnnnnnnnnnnnnnnnnnnnnnnnnnnnnnnnnnnnnnnnnnnnnnnnnnnnnnnnnnnnnnnnnnnnnnnnnnnnnnnnnnnnnnnnnnnnnnnnnnnnnnnnnnnnnnnnnnnnnnnnnnnnnnnnnnnnnnnnnnnnnnnnnnnnnnnnnnnnnnnnnnnnnnnnnnnnnnnnnnnnnnnnnnnnnnnnnnnnnnnnnnnnnnnnnnnnnnnnnnnnnnnnnnnnnnnnnnnnnnnnnnnnnnnnnnnnnnnnnnnnnnnnnnnnnnnnnnnnnnnnnnnnnnnnnnnnnnnnnnnnnnnnnnnnnnnnnnnnnnnnnnnnnnnnnnnnnnnnnnnnnnnnnnnnnnnnnnnnnnnnnnnnnnnnnnnnnnnnnnnnnnnnnnnnnnnnnnnnnnnnnnnnnnnnnnnnnnnnnnnnnnnnnnnnnnnnnnnnnnnnnnnnnnnnnnnnnnnnnnnnnnnnnnnnnnnnnnnnnnnnnnnnnnnnnnnnnnnnnnnnnnnnnnnnnnnnnnnnnnnnnnnnnnnnnnnnnnnnnnnnnnnnnnnnnnnnnnnnnnnnnnnnnnnnnnnnnnnnnnnnnnnnnnnnnnnnnnnnnnnnnnnnnnnnnnnnnnnnnnnnnnnnnnnnnnnnnnnnnnnnnnnnnnnnnnnnnnnnnnnnnnnnnnnnnnnnnnnnnnnnnnnnnnnnnnnnnnnnnnnnnnnnnnnnnnnnnnnnnnnnnnnnnnnnnnnnnnnnnnnnnnnnnnnnnnnnnnnnnnnnnnnnnnnnnnnnnnnnnnnnnnnnnnnnnnnnnnnnnnnnnnnnnnnnnnnnnnnnnnnnnnnnnnnnnnnnnnnnnnnnnnnnnnnnnnnnnnnnnnnnnnnnnnnnnnnnnnnnnnnnnnnnnnnnnnnnnnnnnnnnnnnnnnnnnnnnnnnnnnnnnnnnnnnnnnnnnnnnnnnnnnnnnnnnnnnnnnnnnnnnnnnnnnnnnnnnnnnnnnnnnnnnnnnnnnnnnnnnnnnnnnnnnnnnnnnnnnnnnnnnnnnnnnnnnnnnnnnnnnnnnnnnnnnnnnnnnnnnnnnnnnnnnnnnnnnnnnnnnnnnnnnnnnnnnnnnnnnnnnnnnnnnnnnnnnnnnnnnnnnnnnnnnnnnnnnnnnnnnnnnnnnnnnnnnnnnnnnnnnnnnnnnnnnnnnnnnnnnnnnnnnnnnnnnnnnnnnnnnnnnnnnnnnnnnnnnnnnnnnnnnnnnnnnnnnnnnnnnnnnnnnnnnnnnnnnnnnnnnnnnnnnnnnnnnnnnnnnnnnnnnnnnnnnnnnnnnnnnnnnnnnnnnnnnnnnnnnnnnnnnnnnnnnnnnnnnnnnnnnnnnnnnnnnnnnnnnnnnnnnnnnnnnnnnnnnnnnnnnnnnnnnnnnnnnnnnnnnnnnnnnnnnnnnnnnnnnnnnnnnnnnnnnnnnnnnnnnnnnnnnnnnnnnnnnnnnnnnnnnnnnnnnnnnnnnnnnnnnnnnnnnnnnnnnnnnnnnnnnnnnnnnnnnnnnnnnnnnnnnnnnnnnnnnnnnnnnnnnnnnnnnnnnnnnnnnnnnnnnnnnnnnnnnnnnnnnnnnnnnnnnnnnnnnnnnnnnnnnnnnnnnnnnnnnnnnnnnnnnnnnnnnnnnnnnnnnnnnnnnnnnnnnnnnnnnnnnnnnnnnnnnnnnnnnnnnnnnnnnnnnnnnnnnnnnnnnnnnnnnnnnnnnnnnnnnnnnnnnnnnnnnnnnnnnnnnnnnnnnnnnnnnnnnnnnnnnnnnnnnnnnnnnnnnnnnnnnnnnnnnnnnnnnnnnnnnnnnnnnnnnnnnnnnnnnnnnnnnnnnnnnnnnnnnnnnnnnnnnnnnnnnnnnnnnnnnnnnnnnnnnnnnnnnnnnnnnnnnnnnnnnnnnnnnnnnnnnnnnnnnnnnnnnnnnnnnnnnnnnnnnnnnnnnnnnnnnnnnnnnnnnnnnnnnnnnnnnnnnnnnnnnnnnnnnnnnnnnnnnnnnnnnnnnnnnnnnnnnnnnnnnnnnnnnnnnnnnnnnnnnnnnnnnnnnnnnnnnnnnnnnnnnnnnnnnnnnnnnnnnnnnnnnnnnnnnnnnnnnnnnnnnnnnnnnnnnnnnnnnnnnnnnnnnnnnnnnnnnnnnnnnnnnnnnnnnnnnnnnnnnnnnnnnnnnnnnnnnnnnnnnnnnnnnnnnnnnnnnnnnnnnnnnnnnnnnnnnnnnnnnnnnnnnnnnnnnnnnnnnnnnnnnnnnnnnnnnnnnnnnnnnnnnnnnnnnnnnnnnnnnnnnnnnnnnnnnnnnnnnnnnnnnnnnnnnnnnnnnnnnnnnnnnnnnnnnnnnnnnnnnnnnnnnnnnnnnnnnnnnnnnnnnnnnnnnnnnnnnnnnnnnnnnnnnnnnnnnnnnnnnnnnnnnnnnnnnnnnnnnnnnnnnnnnnnnnnnnnnnnnnnnnnnnnnnnnnnnnnnnnnnnnnnnnnnnnnnnnnnnnnnnnnnnnnnnnnnnnnnnnnnnnnnnnnnnnnnnnnnnnnnnnnnnnnnnnnnnnnnnnnnnnnnnnnnnnnnnnnnnnnnnnnnnnnnnnnnnnnnnnnnnnnnnnnnnnnnnnnnnnnnnnnnnnnnnnnnnnnnnnnnnnnnnnnnnnnnnnnnnnnnnnnnnnnnnnnnnnnnnnnnnnnnnnnnnnnnnnnnnnnnnnnnnnnnnnnnnnnnnnnnnnnnnnnnnnnnnnnnnnnnnnnnnnnnnnnnnnnnnnnnnnnnnnnnnnnnnnnnnnnnnnnnnnnnnnnnnnnnnnnnnnnnnnnnnnnnnnnnnnnnnnnnnnnnnnnnnnnnnnnnnnnnnnnnnnnnnnnnnnnnnnnnnnnnnnnnnnnnnnnnnnnnnnnnnnnnnnnnnnnnnnnnnnnnnnnnnnnnnnnnnnnnnnnnnnnnnnnnnnnnnnnnnnnnnnnnnnnnnnnnnnnnnnnnnnnnnnnnnnnnnnnnnnnnnnnnnnnnnnnnnnnnnnnnnnnnnnnnnnnnnnnnnnnnnnnnnnnnnnnnnnnnnnnnnnnnnnnnnnnnnnnnnnnnnnnnnnnnnnnnnnnnnnnnnnnnnnnnnnnnnnnnnnnnnnnnnnnnnnnnnnnnnnnnnnnnnnnnnnnnnnnnnnnnnnnnnnnnnnnnnnnnnnnnnnnnnnnnnnnnnnnnnnnnnnnnnnnnnnnnnnnnnnnnnnnnnnnnnnnnnnnnnnnnnnnnnnnnnnnnnnnnnnnnnnnnnnnnnnnnnnnnnnnnnnnnnnnnnnnnnnnnnnnnnnnnnnnnnnnnnnnnnnnnnnnnnnnnnnnnnnnnnnnnnnnnnnnnnnnnnnnnnnnnnnnnnnnnnnnnnnnnnnnnnnnnnnnnnnnnnnnnnnnnnnnnnnnnnnnnnnnnnnnnnnnnnnnnnnnnnnnnnnnnnnnnnnnnnnnnnnnnnnnnnnnnnnnnnnnnnnnnnnnnnnnnnnnnnnnnnnnnnnnnnnnnnnnnnnnnnnnnnnnnnnnnnnnnnnnnnnnnnnnnnnnnnnnnnnnnnnnnnnnnnnnnnnnnnnnnnnnnnnnnnnnnnnnnnnnnnnnnnnnnnnnnnnnnnnnnnnnnnnnnnnnnnnnnnnnnnnnnnnnnnnnnnnnnnnnnnnnnnnnnnnnnnnnnnnnnnnnnnnnnnnnnnnnnnnnnnnnnnnnnnnnnnnnnnnnnnnnnnnnnnnnnnnnnnnnnnnnnnnnnnnnnnnnnnnnnnnnnnnnnnnnnnnnnnnnnnnnnnnnnnnnnnnnnnnnnnnnnnnnnnnnnnnnnnnnnnnnnnnnnnnnnnnnnnnnnnnnnnnnnnnnnnnnnnnnnnnnnnnnnnnnnnnnnnnnnnnnnnnnnnnnnnnnnnnnnnnnnnnnnnnnnnnnnnnnnnnnnnnnnnnnnnnnnnnnnnnnnnnnnnnnnnnnnnnnnnnnnnnnnnnnnnnnnnnnnnnnnnnnnnnnnnnnnnnnnnnnnnnnnnnnnnnnnnnnnnnnnnnnnnnnnnnnnnnnnnnnnnnnnnnnnnnnnnnnnnnnnnnnnnnnnnnnnnnnnnnnnnnnnnnnnnnnnnnnnnnnnnnnnnnnnnnnnnnnnnnnnnnnnnnnnnnnnnnnnnnnnnnnnnnnnnnnnnnnnnnnnnnnnnnnnnnnnnnnnnnnnnnnnnnnnnnnnnnnnnnnnnnnnnnnnnnnnnnnnnnnnnnnnnnnnnnnnnnnnnnnnnnnnnnnnnnnnnnnnnnnnnnnnnnnnnnnnnnnnnnnnnnnnnnnnnnnnnnnnnnnnnnnnnnnnnnnnnnnnnnnnnnnnnnnnnnnnnnnnnnnnnnnnnnnnnnnnnnnnnnnnnnnnnnnnnnnnnnnnnnnnnnnnnnnnnnnnnnnnnnnnnnnnnnnnnnnnnnnnnnnnnnnnnnnnnnnnnnnnnnnnnnnnnnnnnnnnnnnnnnnnnnnnnnnnnnnnnnnnnnnnnnnnnnnnnnnnnnnnnnnnnnnnnnnnnnnnnnnnnnnnnnnnnnnnnnnnnnnnnnnnnnnnnnnnnnnnnnnnnnnnnnnnnnnnnnnnnnnnnnnnnnnnnnnnnnnnnnnnnnnnnnnnnnnnnnnnnnnnnnnnnnnnnnnnnnnnnnnnnnnnnnnnnnnnnnnnnnnnnnnnnnnnnnnnnnnnnnnnnnnnnnnnnnnnnnnnnnnnnnnnnnnnnnnnnnnnnnnnnnnnnnnnnnnnnnnnnnnnnnnnnnnnnnnnnnnnnnnnnnnnnnnnnnnnnnnnnnnnnnnnnnnnnnnnnnnnnnnnnnnnnnnnnnnnnnnnnnnnnnnnnnnnnnnnnnnnnnnnnnnnnnnnnnnnnnnnnnnnnnnnnnnnnnnnnnnnnnnnnnnnnnnnnnnnnnnnnnnnnnnnnnnnnnnnnnnnnnnnnnnnnnnnnnnnnnnnnnnnnnnnnnnnnnnnnnnnnnnnnnnnnnnnnnnnnnnnnnnnnnnnnnnnnnnnnnnnnnnnnnnnnnnnnnnnnnnnnnnnnnnnnnnnnnnnnnnnnnnnnnnnnnnnnnnnnnnnnnnnnnnnnnnnnnnnnnnnnnnnnnnnnnnnnnnnnnnnnnnnnnnnnnnnnnnnnnnnnnnnnnnnnnnnnnnnnnnnnnnnnnnnnnnnnnnnnnnnnnnnnnnnnnnnnnnnnnnnnnnnnnnnnnnnnnnnnnnnnnnnnnnnnnnnnnnnnnnnnnnnnnnnnnnnnnnnnnnnnnnnnnnnnnnnnnnnnnnnnnnnnnnnnnnnnnnnnnnnnnnnnnnnnnnnnnnnnnnnnnnnnnnnnnnnnnnnnnnnnnnnnnnnnnnnnnnnnnnnnnnnnnnnnnnnnnnnnnnnnnnnnnnnnnnnnnnnnnnnnnnnnnnnnnnnnnnnnnnnnnnnnnnnnnnnnnnnnnnnnnnnnnnnnnnnnnnnnnnnnnnnnnnnnnnnnnnnnnnnnnnnnnnnnnnnnnnnnnnnnnnnnnnnnnnnnnnnnnnnnnnnnnnnnnnnnnnnnnnnnnnnnnnnnnnnnnnnnnnnnnnnnnnnnnnnnnnnnnnnnnnnnnnnnnnnnnnnnnnnnnnnnnnnnnnnnnnnnnnnnnnnnnnnnnnnnnnnnnnnnnnnnnnnnnnnnnnnnnnnnnnnnnnnnnnnnnnnnnnnnnnnnnnnnnnnnnnnnnnnnnnnnnnnnnnnnnnnnnnnnnnnnnnnnnnnnnnnnnnnnnnnnnnnnnnnnnnnnnnnnnnnnnnnnnnnnnnnnnnnnnnnnnnnnnnnnnnnnnnnnnnnnnnnnnnnnnnnnnnnnnnnnnnnnnnnnnnnnnnnnnnnnnnnnnnnnnnnnnnnnnnnnnnnnnnnnnnnnnnnnnnnnnnnnnnnnnnnnnnnnnnnnnnnnnnnnnnnnnnnnnnnnnnnnnnnnnnnnnnnnnnnnnnnnnnnnnnnnnnnnnnnnnnnnnnnnnnnnnnnnnnnnnnnnnnnnnnnnnnnnnnnnnnnnnnnnnnnnnnnnnnnnnnnnnnnnnnnnnnnnnnnnnnnnnnnnnnnnnnnnnnnnnnnnnnnnnnnnnnnnnnnnnnnnnnnnnnnnnnnnnnnnnnnnnnnnnnnnnnnnnnnnnnnnnnnnnnnnnnnnnnnnnnnnnnnnnnnnnnnnnnnnnnnnnnnnnnnnnnnnnnnnnnnnnnnnnnnnnnnnnnnnnnnnnnnnnnnnnnnnnnnnnnnnnnnnnnnnnnnnnnnnnnnnnnnnnnnnnnnnnnnnnnnnnnnnnnnnnnnnnnnnnnnnnnnnnnnnnnnnnnnnnnnnnnnnnnnnnnnnnnnnnnnnnnnnnnnnnnnnnnnnnnnnnnnnnnnnnnnnnnnnnnnnnnnnnnnnnnnnnnnnnnnnnnnnnnnnnnnnnnnnnnnnnnnnnnnnnnnnnnnnnnnnnnnnnnnnnnnnnnnnnnnnnnnnnnnnnnnnnnnnnnnnnnnnnnnnnnnnnnnnnnnnnnnnnnnnnnnnnnnnnnnnnnnnnnnnnnnnnnnnnnnnnnnnnnnnnnnnnnnnnnnnnnnnnnnnnnnnnnnnnnnnnnnnnnnnnnnnnnnnnnnnnnnnnnnnnnnnnnnnnnnnnnnnnnnnnnnnnnnnnnnnnnnnnnnnnnnnnnnnnnnnnnnnnnnnnnnnnnnnnnnnnnnnnnnnnnnnnnnnnnnnnnnnnnnnnnnnnnnnnnnnnnnnnnnnnnnnnnnnnnnnnnnnnnnnnnnnnnnnnnnnnnnnnnnnnnnnnnnnnnnnnnnnnnnnnnnnnnnnnnnnnnnnnnnnnnnnnnnnnnnnnnnnnnnnnnnnnnnnnnnnnnnnnnnnnnnnnnnnnnnnnnnnnnnnnnnnnnnnnnnnnnnnnnnnnnnnnnnnnnnnnnnnnnnnnnnnnnnnnnnnnnnnnnnnnnnnnnnnnnnnnnnnnnnnnnnnnnnnnnnnnnnnnnnnnnnnnnnnnnnnnnnnnnnnnnnnnnnnnnnnnnnnnnnnnnnnnnnnnnnnnnnnnnnnnnnnnnnnnnnnnnnnnnnnnnnnnnnnnnnnnnnnnnnnnnnnnnnnnnnnnnnnnnnnnnnnnnnnnnnnnnnnnnnnnnnnnnnnnnnnnnnnnnnnnnnnnnnnnnnnnnnnnnnnnnnnnnnnnnnnnnnnnnnnnnnnnnnnnnnnnnnnnnnnnnnnnnnnnnnnnnnnnnnnnnnnnnnnnnnnnnnnnnnnnnnnnnnnnnnnnnnnnnnnnnnnnnnnnnnnnnnnnnnnnnnnnnnnnnnnnnnnnnnnnnnnnnnnnnnnnnnnnnnnnnnnnnnnnnnnnnnnnnnnnnnnnnnnnnnnnnnnnnnnnnnnnnnnnnnnnnnnnnnnnnnnnnnnnnnnnnnnnnnnnnnnnnnnnnnnnnnnnnnnnnnnnnnnnnnnnnnnnnnnnnnnnnnnnnnnnnnnnnnnnnnnnnnnnnnnnnnnnnnnnnnnnnnnnnnnnnnnnnnnnnnnnnnnnnnnnnnnnnnnnnnnnnnnnnnnnnnnnnnnnnnnnnnnnnnnnnnnnnnnnnnnnnnnnnnnnnnnnnnnnnnnnnnnnnnnnnnnnnnnnnnnnnnnnnnnnnnnnnnnnnnnnnnnnnnnnnnnnnnnnnnnnnnnnnnnnnnnnnnnnnnnnnnnnnnnnnnnnnnnnnnnnnnnnnnnnnnnnnnnnnnnnnnnnnnnnnnnnnnnnnnnnnnnnnnnnnnnnnnnnnnnnnnnnnnnnnnnnnnnnnnnnnnnnnnnnnnnnnnnnnnnnnnnnnnnnnnnnnnnnnnnnnnnnnnnnnnnnnnnnnnnnnnnnnnnnnnnnnnnnnnnnnnnnnnnnnnnnnnnnnnnnnnnnnnnnnnnnnnnnnnnnnnnnnnnnnnnnnnnnnnnnnnnnnnnnnnnnnnnnnnnnnnnnnnnnnnnnnnnnnnnnnnnnnnnnnnnnnnnnnnnnnnnnnnnnnnnnnnnnnnnnnnnnnnnnnnnnnnnnnnnnnnnnnnnnnnnnnnnnnnnnnnnnnnnnnnnnnnnnnnnnnnnnnnnnnnnnnnnnnnnnnnnnnnnnnnnnnnnnnnnnnnnnnnnnnnnnnnnnnnnnnnnnnnnnnnnnnnnnnnnnnnnnnnnnnnnnnnnnnnnnnnnnnnnnnnnnnnnnnnnnnnnnnnnnnnnnnnnnnnnnnnnnnnnnnnnnnnnnnnnnnnnnnnnnnnnnnnnnnnnnnnnnnnnnnnnnnnnnnnnnnnnnnnnnnnnnnnnnnnnnnnnnnnnnnnnnnnnnnnnnnnnnnnnnnnnnnnnnnnnnnnnnnnnnnnnnnnnnnnnnnnnnnnnnnnnnnnnnnnnnnnnnnnnnnnnnnnnnnnnnnnnnnnnnnnnnnnnnnnnnnnnnnnnnnnnnnnnnnnnnnnnnnnnnnnnnnnnnnnnnnnnnnnnnnnnnnnnnnnnnnnnnnnnnnnnnnnnnnnnnnnnnnnnnnnnnnnnnnnnnnnnnnnnnnnnnnnnnnnnnnnnnnnnnnnnnnnnnnnnnnnnnnnnnnnnnnnnnnnnnnnnnnnnnnnnnnnnnnnnnnnnnnnnnnnnnnnnnnnnnnnnnnnnnnnnnnnnnnnnnnnnnnnnnnnnnnnnnnnnnnnnnnnnnnnnnnnnnnnnnnnnnnnnnnnnnnnnnnnnnnnnnnnnnnnnnnnnnnnnnnnnnnnnnnnnnnnnnnnnnnnnnnnnnnnnnnnnnnnnnnnnnnnnnnnnnnnnnnnnnnnnnnnnnnnnnnnnnnnnnnnnnnnnnnnnnnnnnnnnnnnnnnnnnnnnnnnnnnnnnnnnnnnnnnnnnnnnnnnnnnnnnnnnnnnnnnnnnnnnnnnnnnnnnnnnnnnnnnnnnnnnnnnnnnnnnnnnnnnnnnnnnnnnnnnnnnnnnnnnnnnnnnnnnnnnnnnnnnnnnnnnnnnnnnnnnnnnnnnnnnnnnnnnnnnnnnnnnnnnnnnnnnnnnnnnnnnnnnnnnnnnnnnnnnnnnnnnnnnnnnnnnnnnnnnnnnnnnnnnnnnnnnnnnnnnnnnnnnnnnnnnnnnnnnnnnnnnnnnnnnnnnnnnnnnnnnnnnnnnnnnnnnnnnnnnnnnnnnnnnnnnnnnnnnnnnnnnnnnnnnnnnnnnnnnnnnnnnnnnnnnnnnnnnnnnnnnnnnnnnnnnnnnnnnnnnnnnnnnnnnnnnnnnnnnnnnnnnnnnnnnnnnnnnnnnnnnnnnnnnnnnnnnnnnnnnnnnnnnnnnnnnnnnnnnnnnnnnnnnnnnnnnnnnnnnnnnnnnnnnnnnnnnnnnnnnnnnnnnnnnnnnnnnnnnnnnnnnnnnnnnnnnnnnnnnnnnnnnnnnnnnnnnnnnnnnnnnnnnnnnnnnnnnnnnnnnnnnnnnnnnnnnnnnnnnnnnnnnnnnnnnnnnnnnnnnnnnnnnnnnnnnnnnnnnnnnnnnnnnnnnnnnnnnnnnnnnnnnnnnnnnnnnnnnnnnnnnnnnnnnnnnnnnnnnnnnnnnnnnnnnnnnnnnnnnnnnnnnnnnnnnnnnnnnnnnnnnnnnnnnnnnnnnnnnnnnnnnnnnnnnnnnnnnnnnnnnnnnnnnnnnnnnnnnnnnnnnnnnnnnnnnnnnnnnnnnnnnnnnnnnnnnnnnnnnnnnnnnnnnnnnnnnnnnnnnnnnnnnnnnnnnnnnnnnnnnnnnnnnnnnnnnnnnnnnnnnnnnnnnnnnnnnnnnnnnnnnnnnnnnnnnnnnnnnnnnnnnnnnnnnnnnnnnnnnnnnnnnnnnnnnnnnnnnnnnnnnnnnnnnnnnnnnnnnnnnnnnnnnnnnnnnnnnnnnnnnnnnnnnnnnnnnnnnnnnnnnnnnnnnnnnnnnnnnnnnnnnnnnnnnnnnnnnnnnnnnnnnnnnnnnnnnnnnnnnnnnnnnnnnnnnnnnnnnnnnnnnnnnnnnnnnnnnnnnnnnnnnnnnnnnnnnnnnnnnnnnnnnnnnnnnnnnnnnnnnnnnnnnnnnnnnnnnnnnnnnnnnnnnnnnnnnnnnnnnnnnnnnnnnnnnnnnnnnnnnnnnnnnnnnnnnnnnnnnnnnnnnnnnnnnnnnnnnnnnnnnnnnnnnnnnnnnnnnnnnnnnnnnnnnnnnnnnnnnnnnnnnnnnnnnnnnnnnnnnnnnnnnnnnnnnnnnnnnnnnnnnnnnnnnnnnnnnnnnnnnnnnnnnnnnnnnnnnnnnnnnnnnnnnnnnnnnnnnnnnnnnnnnnnnnnnnnnnnnnnnnnnnnnnnnnnnnnnnnnnnnnnnnnnnnnnnnnnnnnnnnnnnnnnnnnnnnnnnnnnnnnnnnnnnnnnnnnnnnnnnnnnnnnnnnnnnnnnnnnnnnnnnnnnnnnnnnnnnnnnnnnnnnnnnnnnnnnnnnnnnnnnnnnnnnnnnnnnnnnnnnnnnnnnnnnnnnnnnnnnnnnnnnnnnnnnnnnnnnnnnnnnnnnnnnnnnnnnnnnnnnnnnnnnnnnnnnnnnnnnnnnnnnnnnnnnnnnnnnnnnnnnnnnnnnnnnnnnnnnnnnnnnnnnnnnnnnnnnnnnnnnnnnnnnnnnnnnnnnnnnnnnnnnnnnnnnnnnnnnnnnnnnnnnnnnnnnnnnnnnnnnnnnnnnnnnnnnnnnnnnnnnnnnnnnnnnnnnnnnnnnnnnnnnnnnnnnnnnnnnnnnnnnnnnnnnnnnnnnnnnnnnnnnnnnnnnnnnnnnnnnnnnnnnnnnnnnnnnnnnnnnnnnnnnnnnnnnnnnnnnnnnnnnnnnnnnnnnnnnnnnnnnnnnnnnnnnnnnnnnnnnnnnnnnnnnnnnnnnnnnnnnnnnnnnnnnnnnnnnnnnnnnnnnnnnnnnnnnnnnnnnnnnnnnnnnnnnnnnnnnnnnnnnnnnnnnnnnnnnnnnnnnnnnnnnnnnnnnnnnnnnnnnnnnnnnnnnnnnnnnnnnnnnnnnnnnnnnnnnnnnnnnnnnnnnnnnnnnnnnnnnnnnnnnnnnnnnnnnnnnnnnnnnnnnnnnnnnnnnnnnnnnnnnnnnnnnnnnnnnnnnnnnnnnnnnnnnnnnnnnnnnnnnnnnnnnnnnnnnnnnnnnnnnnnnnnnnnnnnnnnnnnnnnnnnnnnnnnnnnnnnnnnnnnnnnnnnnnnnnnnnnnnnnnnnnnnnnnnnnnnnnnnnnnnnnnnnnnnnnnnnnnnnnnnnnnnnnnnnnnnnnnnnnnnnnnnnnnnnnnnnnnnnnnnnnnnnnnnnnnnnnnnnnnnnnnnnnnnnnnnnnnnnnnnnnnnnnnnnnnnnnnnnnnnnnnnnnnnnnnnnnnnnnnnnnnnnnnnnnnnnnnnnnnnnnnnnnnnnnnnnnnnnnnnnnnnnnnnnnnnnnnnnnnnnnnnnnnnnnnnnnnnnnnnnnnnnnnnnnnnnnnnnnnnnnnnnnnnnnnnnnnnnnnnnnnnnnnnnnnnnnnnnnnnnnnnnnnnnnnnnnnnnnnnnnnnnnnnnnnnnnnnnnnnnnnnnnnnnnnnnnnnnnnnnnnnnnnnnnnnnnnnnnnnnnnnnnnnnnnnnnnnnnnnnnnnnnnnnnnnnnnnnnnnnnnnnnnnnnnnnnnnnnnnnnnnnnnnnnnnnnnnnnnnnnnnnnnnnnnnnnnnnnnnnnnnnnnnnnnnnnnnnnnnnnnnnnnnnnnnnnnnnnnnnnnnnnnnnnnnnnnnnnnnnnnnnnnnnnnnnnnnnnnnnnnnnnnnnnnnnnnnnnnnnnnnnnnnnnnnnnnnnnnnnnnnnnnnnnnnnnnnnnnnnnnnnnnnnnnnnnnnnnnnnnnnnnnnnnnnnnnnnnnnnnnnnnnnnnnnnnnnnnnnnnnnnnnnnnnnnnnnnnnnnnnnnnnnnnnnnnnnnnnnnnnnnnnnnnnnnnnnnnnnnnnnnnnnnnnnnnnnnnnnnnnnnnnnnnnnnnnnnnnnnnnnnnnnnnnnnnnnnnnnnnnnnnnnnnnnnnnnnnnnnnnnnnnnnnnnnnnnnnnnnnnnnnnnnnnnnnnnnnnnnnnnnnnnnnnnnnnnnnnnnnnnnnnnnnnnnnnnnnnnnnnnnnnnnnnnnnnnnnnnnnnnnnnnnnnnnnnnnnnnnnnnnnnnnnnnnnnnnnnnnnnnnnnnnnnnnnnnnnnnnnnnnnnnnnnnnnnnnnnnnnnnnnnnnnnnnnnnnnnnnnnnnnnnnnnnnnnnnnnnnnnnnnnnnnnnnnnnnnnnnnnnnnnnnnnnnnnnnnnnnnnnnnnnnnnnnnnnnnnnnnnnnnnnnnnnnnnnnnnnnnnnnnnnnnnnnnnnnnnnnnnnnnnnnnnnnnnnnnnnnnnnnnnnnnnnnnnnnnnnnnnnnnnnnnnnnnnnnnnnnnnnnnnnnnnnnnnnnnnnnnnnnnnnnnnnnnnnnnnnnnnnnnnnnnnnnnnnnnnnnnnnnnnnnnnnnnnnnnnnnnnnnnnnnnnnnnnnnnnnnnnnnnnnnnnnnnnnnnnnnnnnnnnnnnnnnnnnnnnnnnnnnnnnnnnnnnnnnnnnnnnnnnnnnnnnnnnnnnnnnnnnnnnnnnnnnnnnnnnnnnnnnnnnnnnnnnnnnnnnnnnnnnnnnnnnnnnnnnnnnnnnnnnnnnnnnnnnnnnnnnnnnnnnnnnnnnnnnnnnnnnnnnnnnnnnnnnnnnnnnnnnnnnnnnnnnnnnnnnnnnnnnnnnnnnnnnnnnnnnnnnnnnnnnnnnnnnnnnnnnnnnnnnnnnnnnnnnnnnnnnnnnnnnnnnnnnnnnnnnnnnnnnnnnnnnnnnnnnnnnnnnnnnnnnnnnnnnnnnnnnnnnnnnnnnnnnnnnnnnnnnnnnnnnnnnnnnnnnnnnnnnnnnnnnnnnnnnnnnnnnnnnnnnnnnnnnnnnnnnnnnnnnnnnnnnnnnnnnnnnnnnnnnnnnnnnnnnnnnnnnnnnnnnnnnnnnnnnnnnnnnnnnnnnnnnnnnnnnnnnnnnnnnnnnnnnnnnnnnnnnnnnnnnnnnnnnnnnnnnnnnnnnnnnnnnnnnnnnnnnnnnnnnnnnnnnnnnnnnnnnnnnnnnnnnnnnnnnnnnnnnnnnnnnnnnnnnnnnnnnnnnnnnnnnnnnnnnnnnnnnnnnnnnnnnnnnnnnnnnnnnnnnnnnnnnnnnnnnnnnnnnnnnnnnnnnnnnnnnnnnnnnnnnnnnnnnnnnnnnnnnnnnnnnnnnnnnnnnnnnnnnnnnnnnnnnnnnnnnnnnnnnnnnnnnnnnnnnnnnnnnnnnnnnnnnnnnnnnnnnnnnnnnnnnnnnnnnnnnnnnnnnnnnnnnnnnnnnnnnnnnnnnnnnnnnnnnnnnnnnnnnnnnnnnnnnnnnnnnnnnnnnnnnnnnnnnnnnnnnnnnnnnnnnnnnnnnnnnnnnnnnnnnnnnnnnnnnnnnnnnnnnnnnnnnnnnnnnnnnnnnnnnnnnnnnnnnnnnnnnnnnnnnnnnnnnnnnnnnnnnnnnnnnnnnnnnnnnnnnnnnnnnnnnnnnnnnnnnnnnnnnnnnnnnnnnnnnnnnnnnnnnnnnnnnnnnnnnnnnnnnnnnnnnnnnnnnnnnnnnnnnnnnnnnnnnnnnnnnnnnnnnnnnnnnnnnnnnnnnnnnnnnnnnnnnnnnnnnnnnnnnnnnnnnnnnnnnnnnnnnnnnnnnnnnnnnnnnnnnnnnnnnnnnnnnnnnnnnnnnnnnnnnnnnnnnnnnnnnnnnnnnnnnnnnnnnnnnnnnnnnnnnnnnnnnnnnnnnnnnnnnnnnnnnnnnnnnnnnnnnnnnnnnnnnnnnnnnnnnnnnnnnnnnnnnnnnnnnnnnnnnnnnnnnnnnnnnnnnnnnnnnnnnnnnnnnnnnnnnnnnnnnnnnnnnnnnnnnnnnnnnnnnnnnnnnnnnnnnnnnnnnnnnnnnnnnnnnnnnnnnnnnnnnnnnnnnnnnnnnnnnnnnnnnnnnnnnnnnnnnnnnnnnnnnnnnnnnnnnnnnnnnnnnnnnnnnnnnnnnnnnnnnnnnnnnnnnnnnnnnnnnnnnnnnnnnnnnnnnnnnnnnnnnnnnnnnnnnnnnnnnnnnnnnnnnnnnnnnnnnnnnnnnnnnnnnnnnnnnnnnnnnnnnnnnnnnnnnnnnnnnnnnnnnnnnnnnnnnnnnnnnnnnnnnnnnnnnnnnnnnnnnnnnnnnnnnnnnnnnnnnnnnnnnnnnnnnnnnnnnnnnnnnnnnnnnnnnnnnnnnnnnnnnnnnnnnnnnnnnnnnnnnnnnnnnnnnnnnnnnnnnnnnnnnnnnnnnnnnnnnnnnnnnnnnnnnnnnnnnnnnnnnnnnnnnnnnnnnnnnnnnnnnnnnnnnnnnnnnnnnnnnnnnnnnnnnnnnnnnnnnnnnnnnnnnnnnnnnnnnnnnnnnnnnnnnnnnnnnnnnnnnnnnnnnnnnnnnnnnnnnnnnnnnnnnnnnnnnnnnnnnnnnnnnnnnnnnnnnnnnnnnnnnnnnnnnnnnnnnnnnnnnnnnnnnnnnnnnnnnnnnnnnnnnnnnnnnnnnnnnnnnnnnnnnnnnnnnnnnnnnnnnnnnnnnnnnnnnnnnnnnnnnnnnnnnnnnnnnnnnnnnnnnnnnnnnnnnnnnnnnnnnnnnnnnnnnnnnnnnnnnnnnnnnnnnnnnnnnnnnnnnnnnnnnnnnnnnnnnnnnnnnnnnnnnnnnnnnnnnnnnnnnnnnnnnnnnnnnnnnnnnnnnnnnnnnnnnnnnnnnnnnnnnnnnnnnnnnnnnnnnnnnnnnnnnnnnnnnnnnnnnnnnnnnnnnnnnnnnnnnnnnnnnnnnnnnnnnnnnnnnnnnnnnnnnnnnnnnnnnnnnnnnnnnnnnnnnnnnnnnnnnnnnnnnnnnnnnnnnnnnnnnnnnnnnnnnnnnnnnnnnnnnnnnnnnnnnnnnnnnnnnnnnnnnnnnnnnnnnnnnnnnnnnnnnnnnnnnnnnnnnnnnnnnnnnnnnnnnnnnnnnnnnnnnnnnnnnnnnnnnnnnnnnnnnnnnnnnnnnnnnnnnnnnnnnnnnnnnnnnnnnnnnnnnnnnnnnnnnnnnnnnnnnnnnnnnnnnnnnnnnnnnnnnnnnnnnnnnnnnnnnnnnnnnnnnnnnnnnnnnnnnnnnnnnnnnnnnnnnnnnnnnnnnnnnnnnnnnnnnnnnnnnnnnnnnnnnnnnnnnnnnnnnnnnnnnnnnnnnnnnnnnnnnnnnnnnnnnnnnnnnnnnnnnnnnnnnnnnnnnnnnnnnnnnnnnnnnnnnnnnnnnnnnnnnnnnnnnnnnnnnnnnnnnnnnnnnnnnnnnnnnnnnnnnnnnnnnnnnnnnnnnnnnnnnnnnnnnnnnnnnnnnnnnnnnnnnnnnnnnnnnnnnnnnnnnnnnnnnnnnnnnnnnnnnnnnnnnnnnnnnnnnnnnnnnnnnnnnnnnnnnnnnnnnnnnnnnnnnnnnnnnnnnnnnnnnnnnnnnnnnnnnnnnnnnnnnnnnnnnnnnnnnnnnnnnnnnnnnnnnnnnnnnnnnnnnnnnnnnnnnnnnnnnnnnnnnnnnnnnnnnnnnnnnnnnnnnnnnnnnnnnnnnnnnnnnnnnnnnnnnnnnnnnnnnnnnnnnnnnnnnnnnnnnnnnnnnnnnnnnnnnnnnnnnnnnnnnnnnnnnnnnnnnnnnnnnnnnnnnnnnnnnnnnnnnnnnnnnnnnnnnnnnnnnnnnnnnnnnnnnnnnnnnnnnnnnnnnnnnnnnnnnnnnnnnnnnnnnnnnnnnnnnnnnnnnnnnnnnnnnnnnnnnnnnnnnnnnnnnnnnnnnnnnnnnnnnnnnnnnnnnnnnnnnnnnnnnnnnnnnnnnnnnnnnnnnnnnnnnnnnnnnnnnnnnnnnnnnnnnnnnnnnnnnnnnnnnnnnnnnnnnnnnnnnnnnnnnnnnnnnnnnnnnnnnnnnnnnnnnnnnnnnnnnnnnnnnnnnnnnnnnnnnnnnnnnnnnnnnnnnnnnnnnnnnnnnnnnnnnnnnnnnnnnnnnnnnnnnnnnnnnnnnnnnnnnnnnnnnnnnnnnnnnnnnnnnnnnnnnnnnnnnnnnnnnnnnnnnnnnnnnnnnnnnnnnnnnnnnnnnnnnnnnnnnnnnnnnnnnnnnnnnnnnnnnnnnnnnnnnnnnnnnnnnnnnnnnnnnnnnnnnnnnnnnnnnnnnnnnnnnnnnnnnnnnnnnnnnnnnnnnnnnnnnnnnnnnnnnnnnnnnnnnnnnnnnnnnnnnnnnnnnnnnnnnnnnnnnnnnnnnnnnnnnnnnnnnnnnnnnnnnnnnnnnnnnnnnnnnnnnnnnnnnnnnnnnnnnnnnnnnnnnnnnnnnnnnnnnnnnnnnnnnnnnnnnnnnnnnnnnnnnnnnnnnnnnnnnnnnnnnnnnnnnnnnnnnnnnnnnnnnnnnnnnnnnnnnnnnnnnnnnnnnnnnnnnnnnnnnnnnnnnnnnnnnnnnnnnnnnnnnnnnnnnnnnnnnnnnnnnnnnnnnnnnnnnnnnnnnnnnnnnnnnnnnnnnnnnnnnnnnnnnnnnnnnnnnnnnnnnnnnnnnnnnnnnnnnnnnnnnnnnnnnnnnnnnnnnnnnnnnnnnnnnnnnnnnnnnnnnnnnnnnnnnnnnnnnnnnnnnnnnnnnnnnnnnnnnnnnnnnnnnnnnnnnnnnnnnnnnnnnnnnnnnnnnnnnnnnnnnnnnnnnnnnnnnnnnnnnnnnnnnnnnnnnnnnnnnnnnnnnnnnnnnnnnnnnnnnnnnnnnnnnnnnnnnnnnnnnnnnnnnnnnnnnnnnnnnnnnnnnnnnnnnnnnnnnnnnnnnnnnnnnnnnnnnnnnnnnnnnnnnnnnnnnnnnnnnnnnnnnnnnnnnnnnnnnnnnnnnnnnnnnnnnnnnnnnnnnnnnnnnnnnnnnnnnnnnnnnnnnnnnnnnnnnnnnnnnnnnnnnnnnnnnnnnnnnnnnnnnnnnnnnnnnnnnnnnnnnnnnnnnnnnnnnnnnnnnnnnnnnnnnnnnnnnnnnnnnnnnnnnnnnnnnnnnnnnnnnnnnnnnnnnnnnnnnnnnnnnnnnnnnnnnnnnnnnnnnnnnnnnnnnnnnnnnnnnnnnnnnnnnnnnnnnnnnnnnnnnnnnnnnnnnnnnnnnnnnnnnnnnnnnnnnnnnnnnnnnnnnnnnnnnnnnnnnnnnnnnnnnnnnnnnnnnnnnnnnnnnnnnnnnnnnnnnnnnnnnnnnnnnnnnnnnnnnnnnnnnnnnnnnnnnnnnnnnnnnnnnnnnnnnnnnnnnnnnnnnnnnnnnnnnnnnnnnnnnnnnnnnnnnnnnnnnnnnnnnnnnnnnnnnnnnnnnnnnnnnnnnnnnnnnnnnnnnnnnnnnnnnnnnnnnnnnnnnnnnnnnnnnnnnnnnnnnnnnnnnnnnnnnnnnnnnnnnnnnnnnnnnnnnnnnnnnnnnnnnnnnnnnnnnnnnnnnnnnnnnnnnnnnnnnnnnnnnnnnnnnnnnnnnnnnnnnnnnnnnnnnnnnnnnnnnnnnnnnnnnnnnnnnnnnnnnnnnnnnnnnnnnnnnnnnnnnnnnnnnnnnnnnnnnnnnnnnnnnnnnnnnnnnnnnnnnnnnnnnnnnnnnnnnnnnnnnnnnnnnnnnnnnnnnnnnnnnnnnnnnnnnnnnnnnnnnnnnnnnnnnnnnnnnnnnnnnnnnnnnnnnnnnnnnnnnnnnnnnnnnnnnnnnnnnnnnnnnnnnnnnnnnnnnnnnnnnnnnnnnnnnnnnnnnnnnnnnnnnnnnnnnnnnnnnnnnnnnnnnnnnnnnnnnnnnnnnnnnnnnnnnnnnnnnnnnnnnnnnnnnnnnnnnnnnnnnnnnnnnnnnnnnnnnnnnnnnnnnnnnnnnnnnnnnnnnnnnnnnnnnnnnnnnnnnnnnnnnnnnnnnnnnnnnnnnnnnnnnnnnnnnnnnnnnnnnnnnnnnnnnnnnnnnnnnnnnnnnnnnnnnnnnnnnnnnnnnnnnnnnnnnnnnnnnnnnnnnnnnnnnnnnnnnnnnnnnnnnnnnnnnnnnnnnnnnnnnnnnnnnnnnnnnnnnnnnnnnnnnnnnnnnnnnnnnnnnnnnnnnnnnnnnnnnnnnnnnnnnnnnnnnnnnnnnnnnnnnnnnnnnnnnnnnnnnnnnnnnnnnnnnnnnnnnnnnnnnnnnnnnnnnnnnnnnnnnnnnnnnnnnnnnnnnnnnnnnnnnnnnnnnnnnnnnnnnnnnnnnnnnnnnnnnnnnnnnnnnnnnnnnnnnnnnnnnnnnnnnnnnnnnnnnnnnnnnnnnnnnnnnnnnnnnnnnnnnnnnnnnnnnnnnnnnnnnnnnnnnnnnnnnnnnnnnnnnnnnnnnnnnnnnnnnnnnnnnnnnnnnnnnnnnnnnnnnnnnnnnnnnnnnnnnnnnnnnnnnnnnnnnnnnnnnnnnnnnnnnnnnnnnnnnnnnnnnnnnnnnnnnnnnnnnnnnnnnnnnnnnnnnnnnnnnnnnnnnnnnnnnnnnnnnnnnnnnnnnnnnnnnnnnnnnnnnnnnnnnnnnnnnnnnnnnnnnnnnnnnnnnnnnnnnnnnnnnnnnnnnnnnnnnnnnnnnnnnnnnnnnnnnnnnnnnnnnnnnnnnnnnnnnnnnnnnnnnnnnnnnnnnnnnnnnnnnnnnnnnnnnnnnnnnnnnnnnnnnnnnnnnnnnnnnnnnnnnnnnnnnnnnnnnnnnnnnnnnnnnnnnnnnnnnnnnnnnnnnnnnnnnnnnnnnnnnnnnnnnnnnnnnnnnnnnnnnnnnnnnnnnnnnnnnnnnnnnnnnnnnnnnnnnnnnnnnnnnnnnnnnnnnnnnnnnnnnnnnnnnnnnnnnnnnnnnnnnnnnnnnnnnnnnnnnnnnnnnnnnnnnnnnnnnnnnnnnnnnnnnnnnnnnnnnnnnnnnnnnnnnnnnnnnnnnnnnnnnnnnnnnnnnnnnnnnnnnnnnnnnnnnnnnnnnnnnnnnnnnnnnnnnnnnnnnnnnnnnnnnnnnnnnnnnnnnnnnnnnnnnnnnnnnnnnnnnnnnnnnnnnnnnnnnnnnnnnnnnnnnnnnnnnnnnnnnnnnnnnnnnnnnnnnnnnnnnnnnnnnnnnnnnnnnnnnnnnnnnnnnnnnnnnnnnnnnnnnnnnnnnnnnnnnnnnnnnnnnnnnnnnnnnnnnnnnnnnnnnnnnnnnnnnnnnnnnnnnnnnnnnnnnnnnnnnnnnnnnnnnnnnnnnnnnnnnnnnnnnnnnnnnnnnnnnnnnnnnnnnnnnnnnnnnnnnnnnnnnnnnnnnnnnnnnnnnnnnnnnnnnnnnnnnnnnnnnnnnnnnnnnnnnnnnnnnnnnnnnnnnnnnnnnnnnnnnnnnnnnnnnnnnnnnnnnnnnnnnnnnnnnnnnnnnnnnnnnnnnnnnnnnnnnnnnnnnnnnnnnnnnnnnnnnnnnnnnnnnnnnnnnnnnnnnnnnnnnnnnnnnnnnnnnnnnnnnnnnnnnnnnnnnnnnnnnnnnnnnnnnnnnnnnnnnnnnnnnnnnnnnnnnnnnnnnnnnnnnnnnnnnnnnnnnnnnnnnnnnnnnnnnnnnnnnnnnnnnnnnnnnnnnnnnnnnnnnnnnnnnnnnnnnnnnnnnnnnnnnnnnnnnnnnnnnnnnnnnnnnnnnnnnnnnnnnnnnnnnnnnnnnnnnnnnnnnnnnnnnnnnnnnnnnnnnnnnnnnnnnnnnnnnnnnnnnnnnnnnnnnnnnnnnnnnnnnnnnnnnnnnnnnnnnnnnnnnnnnnnnnnnnnnnnnnnnnnnnnnnnnnnnnnnnnnnnnnnnnnnnnnnnnnnnnnnnnnnnnnnnnnnnnnnnnnnnnnnnnnnnnnnnnnnnnnnnnnnnnnnnnnnnnnnnnnnnnnnnnnnnnnnnnnnnnnnnnnnnnnnnnnnnnnnnnnnnnnnnnnnnnnnnnnnnnnnnnnnnnnnnnnnnnnnnnnnnnnnnnnnnnnnnnnnnnnnnnnnnnnnnnnnnnnnnnnnnnnnnnnnnnnnnnnnnnnnnnnnnnnnnnnnnnnnnnnnnnnnnnnnnnnnnnnnnnnnnnnnnnnnnnnnnnnnnnnnnnnnnnnnnnnnnnnnnnnnnnnnnnnnnnnnnnnnnnnnnnnnnnnnnnnnnnnnnnnnnnnnnnnnnnnnnnnnnnnnnnnnnnnnnnnnnnnnnnnnnnnnnnnnnnnnnnnnnnnnnnnnnnnnnnnnnnnnnnnnnnnnnnnnnnnnnnnnnnnnnnnnnnnnnnnnnnnnnnnnnnnnnnnnnnnnnnnnnnnnnnnnnnnnnnnnnnnnnnnnnnnnnnnnnnnnnnnnnnnnnnnnnnnnnnnnnnnnnnnnnnnnnnnnnnnnnnnnnnnnnnnnnnnnnnnnnnnnnnnnnnnnnnnnnnnnnnnnnnnnnnnnnnnnnnnnnnnnnnnnnnnnnnnnnnnnnnnnnnnnnnnnnnnnnnnnnnnnnnnnnnnnnnnnnnnnnnnnnnnnnnnnnnnnnnnnnnnnnnnnnnnnnnnnnnnnnnnnnnnnnnnnnnnnnnnnnnnnnnnnnnnnnnnnnnnnnnnnnnnnnnnnnnnnnnnnnnnnnnnnnnnnnnnnnnnnnnnnnnnnnnnnnnnnnnnnnnnnnnnnnnnnnnnnnnnnnnnnnnnnnnnnnnnnnnnnnnnnnnnnnnnnnnnnnnnnnnnnnnnnnnnnnnnnnnnnnnnnnnnnnnnnnnnnnnnnnnnnnnnnnnnnnnnnnnnnnnnnnnnnnnnnnnnnnnnnnnnnnnnnnnnnnnnnnnnnnnnnnnnnnnnnnnnnnnnnnnnnnnnnnnnnnnnnnnnnnnnnnnnnnnnnnnnnnnnnnnnnnnnnnnnnnnnnnnnnnnnnnnnnnnnnnnnnnnnnnnnnnnnnnnnnnnnnnnnnnnnnnnnnnnnnnnnnnnnnnnnnnnnnnnnnnnnnnnnnnnnnnnnnnnnnnnnnnnnnnnnnnnnnnnnnnnnnnnnnnnnnnnnnnnnnnnnnnnnnnnnnnnnnnnnnnnnnnnnnnnnnnnnnnnnnnnnnnnnnnnnnnnnnnnnnnnnnnnnnnnnnnnnnnnnnnnnnnnnnnnnnnnnnnnnnnnnnnnnnnnnnnnnnnnnnnnnnnnnnnnnnnnnnnnnnnnnnnnnnnnnnnnnnnnnnnnnnnnnnnnnnnnnnnnnnnnnnnnnnnnnnnnnnnnnnnnnnnnnnnnnnnnnnnnnnnnnnnnnnnnnnnnnnnnnnnnnnnnnnnnnnnnnnnnnnnnnnnnnnnnnnnnnnnnnnnnnnnnnnnnnnnnnnnnnnnnnnnnnnnnnnnnnnnnnnnnnnnnnnnnnnnnnnnnnnnnnnnnnnnnnnnnnnnnnnnnnnnnnnnnnnnnnnnnnnnnnnnnnnnnnnnnnnnnnnnnnnnnnnnnnnnnnnnnnnnnnnnnnnnnnnnnnnnnnnnnnnnnnnnnnnnnnnnnnnnnnnnnnnnnnnnnnnnnnnnnnnnnnnnnnnnnnnnnnnnnnnnnnnnnnnnnnnnnnnnnnnnnnnnnnnnnnnnnnnnnnnnnnnnnnnnnnnnnnnnnnnnnnnnnnnnnnnnnnnnnnnnnnnnnnnnnnnnnnnnnnnnnnnnnnnnnnnnnnnnnnnnnnnnnnnnnnnnnnnnnnnnnnnnnnnnnnnnnnnnnnnnnnnnnnnnnnnnnnnnnnnnnnnnnnnnnnnnnnnnnnnnnnnnnnnnnnnnnnnnnnnnnnnnnnnnnnnnnnnnnnnnnnnnnnnnnnnnnnnnnnnnnnnnnnnnnnnnnnnnnnnnnnnnnnnnnnnnnnnnnnnnnnnnnnnnnnnnnnnnnnnnnnnnnnnnnnnnnnnnnnnnnnnnnnnnnnnnnnnnnnnnnnnnnnnnnnnnnnnnnnnnnnnnnnnnnnnnnnnnnnnnnnnnnnnnnnnnnnnnnnnnnnnnnnnnnnnnnnnnnnnnnnnnnnnnnnnnnnnnnnnnnnnnnnnnnnnnnnnnnnnnnnnnnnnnnnnnnnnnnnnnnnnnnnnnnnnnnnnnnnnnnnnnnnnnnnnnnnnnnnnnnnnnnnnnnnnnnnnnnnnnnnnnnnnnnnnnnnnnnnnnnnnnnnnnnnnnnnnnnnnnnnnnnnnnnnnnnnnnnnnnnnnnnnnnnnnnnnnnnnnnnnnnnnnnnnnnnnnnnnnnnnnnnnnnnnnnnnnnnnnnnnnnnnnnnnnnnnnnnnnnnnnnnnnnnnnnnnnnnnnnnnnnnnnnnnnnnnnnnnnnnnnnnnnnnnnnnnnnnnnnnnnnnnnnnnnnnnnnnnnnnnnnnnnnnnnnnnnnnnnnnnnnnnnnnnnnnnnnnnnnnnnnnnnnnnnnnnnnnnnnnnnnnnnnnnnnnnnnnnnnnnnnnnnnnnnnnnnnnnnnnnnnnnnnnnnnnnnnnnnnnnnnnnnnnnnnnnnnnnnnnnnnnnnnnnnnnnnnnnnnnnnnnnnnnnnnnnnnnnnnnnnnnnnnnnnnnnnnnnnnnnnnnnnnnnnnnnnnnnnnnnnnnnnnnnnnnnnnnnnnnnnnnnnnnnnnnnnnnnnnnnnnnnnnnnnnnnnnnnnnnnnnnnnnnnnnnnnnnnnnnnnnnnnnnnnnnnnnnnnnnnnnnnnnnnnnnnnnnnnnnnnnnnnnnnnnnnnnnnnnnnnnnnnnnnnnnnnnnnnnnnnnnnnnnnnnnnnnnnnnnnnnnnnnnnnnnnnnnnnnnnnnnnnnnnnnnnnnnnnnnnnnnnnnnnnnnnnnnnnnnnnnnnnnnnnnnnnnnnnnnnnnnnnnnnnnnnnnnnnnnnnnnnnnnnnnnnnnnnnnnnnnnnnnnnnnnnnnnnnnnnnnnnnnnnnnnnnnnnnnnnnnnnnnnnnnnnnnnnnnnnnnnnnnnnnnnnnnnnnnnnnnnnnnnnnnnnnnnnnnnnnnnnnnnnnnnnnnnnnnnnnnnnnnnnnnnnnnnnnnnnnnnnnnnnnnnnnnnnnnnnnnnnnnnnnnnnnnnnnnnnnnnnnnnnnnnnnnnnnnnnnnnnnnnnnnnnnnnnnnnnnnnnnnnnnnnnnnnnnnnnnnnnnnnnnnnnnnnnnnnnnnnnnnnnnnnnnnnnnnnnnnnnnnnnnnnnnnnnnnnnnnnnnnnnnnnnnnnnnnnnnnnnnnnnnnnnnnnnnnnnnnnnnnnnnnnnnnnnnnnnnnnnnnnnnnnnnnnnnnnnnnnnnnnnnnnnnnnnnnnnnnnnnnnnnnnnnnnnnnnnnnnnnnnnnnnnnnnnnnnnnnnnnnnnnnnnnnnnnnnnnnnnnnnnnnnnnnnnnnnnnnnnnnnnnnnnnnnnnnnnnnnnnnnnnnnnnnnnnnnnnnnnnnnnnnnnnnnnnnnnnnnnnnnnnnnnnnnnnnnnnnnnnnnnnnnnnnnnnnnnnnnnnnnnnnnnnnnnnnnnnnnnnnnnnnnnnnnnnnnnnnnnnnnnnnnnnnnnnnnnnnnnnnnnnnnnnnnnnnnnnnnnnnnnnnnnnnnnnnnnnnnnnnnnnnnnnnnnnnnnnnnnnnnnnnnnnnnnnnnnnnnnnnnnnnnnnnnnnnnnnnnnnnnnnnnnnnnnnnnnnnnnnnnnnnnnnnnnnnnnnnnnnnnnnnnnnnnnnnnnnnnnnnnnnnnnnnnnnnnnnnnnnnnnnnnnnnnnnnnnnnnnnnnnnnnnnnnnnnnnnnnnnnnnnnnnnnnnnnnnnnnnnnnnnnnnnnnnnnnnnnnnnnnnnnnnnnnnnnnnnnnnnnnnnnnnnnnnnnnnnnnnnnnnnnnnnnnnnnnnnnnnnnnnnnnnnnnnnnnnnnnnnnnnnnnnnnnnnnnnnnnnnnnnnnnnnnnnnnnnnnnnnnnnnnnnnnnnnnnnnnnnnnnnnnnnnnnnnnnnnnnnnnnnnnnnnnnnnnnnnnnnnnnnnnnnnnnnnnnnnnnnnnnnnnnnnnnnnnnnnnnnnnnnnnnnnnnnnnnnnnnnnnnnnnnnnnnnnnnnnnnnnnnnnnnnnnnnnnnnnnnnnnnnnnnnnnnnnnnnnnnnnnnnnnnnnnnnnnnnnnnnnnnnnnnnnnnnnnnnnnnnnnnnnnnnnnnnnnnnnnnnnnnnnnnnnnnnnnnnnnnnnnnnnnnnnnnnnnnnnnnnnnnnnnnnnnnnnnnnnnnnnnnnnnnnnnnnnnnnnnnnnnnnnnnnnnnnnnnnnnnnnnnnnnnnnnnnnnnnnnnnnnnnnnnnnnnnnnnnnnnnnnnnnnnnnnnnnnnnnnnnnnnnnnnnnnnnnnnnnnnnnnnnnnnnnnnnnnnnnnnnnnnnnnnnnnnnnnnnnnnnnnnnnnnnnnnnnnnnnnnnnnnnnnnnnnnnnnnnnnnnnnnnnnnnnnnnnnnnnnnnnnnnnnnnnnnnnnnnnnnnnnnnnnnnnnnnnnnnnnnnnnnnnnnnnnnnnnnnnnnnnnnnnnnnnnnnnnnnnnnnnnnnnnnnnnnnnnnnnnnnnnnnnnnnnnnnnnnnnnnnnnnnnnnnnnnnnnnnnnnnnnnnnnnnnnnnnnnnnnnnnnnnnnnnnnnnnnnnnnnnnnnnnnnnnnnnnnnnnnnnnnnnnnnnnnnnnnnnnnnnnnnnnnnnnnnnnnnnnnnnnnnnnnnnnnnnnnnnnnnnnnnnnnnnnnnnnnnnnnnnnnnnnnnnnnnnnnnnnnnnnnnnnnnnnnnnnnnnnnnnnnnnnnnnnnnnnnnnnnnnnnnnnnnnnnnnnnnnnnnnnnnnnnnnnnnnnnnnnnnnnnnnnnnnnnnnnnnnnnnnnnnnnnnnnnnnnnnnnnnnnnnnnnnnnnnnnnnnnnnnnnnnnnnnnnnnnnnnnnnnnnnnnnnnnnnnnnnnnnnnnnnnnnnnnnnnnnnnnnnnnnnnnnnnnnnnnnnnnnnnnnnnnnnnnnnnnnnnnnnnnnnnnnnnnnnnnnnnnnnnnnnnnnnnnnnnnnnnnnnnnnnnnnnnnnnnnnnnnnnnnnnnnnnnnnnnnnnnnnnnnnnnnnnnnnnnnnnnnnnnnnnnnnnnnnnnnnnnnnnnnnnnnnnnnnnnnnnnnnnnnnnnnnnnnnnnnnnnnnnnnnnnnnnnnnnnnnnnnnnnnnnnnnnnnnnnnnnnnnnnnnnnnnnnnnnnnnnnnnnnnnnnnnnnnnnnnnnnnnnnnnnnnnnnnnnnnnnnnnnnnnnnnnnnnnnnnnnnnnnnnnnnnnnnnnnnnnnnnnnnnnnnnnnnnnnnnnnnnnnnnnnnnnnnnnnnnnnnnnnnnnnnnnnnnnnnnnnnnnnnnnnnnnnnnnnnnnnnnnnnnnnnnnnnnnnnnnnnnnnnnnnnnnnnnnnnnnnnnnnnnnnnnnnnnnnnnnnnnnnnnnnnnnnnnnnnnnnnnnnnnnnnnnnnnnnnnnnnnnnnnnnnnnnnnnnnnnnnnnnnnnnnnnnnnnnnnnnnnnnnnnnnnnnnnnnnnnnnnnnnnnnnnnnnnnnnnnnnnnnnnnnnnnnnnnnnnnnnnnnnnnnnnnnnnnnnnnnnnnnnnnnnnnnnnnnnnnnnnnnnnnnnnnnnnnnnnnnnnnnnnnnnnnnnnnnnnnnnnnnnnnnnnnnnnnnnnnnnnnnnnnnnnnnnnnnnnnnnnnnnnnnnnnnnnnnnnnnnnnnnnnnnnnnnnnnnnnnnnnnnnnnnnnnnnnnnnnnnnnnnnnnnnnnnnnnnnnnnnnnnnnnnnnnnnnnnnnnnnnnnnnnnnnnnnnnnnnnnnnnnnnnnnnnnnnnnnnnnnnnnnnnnnnnnnnnnnnnnnnnnnnnnnnnnnnnnnnnnnnnnnnnnnnnnnnnnnnnnnnnnnnnnnnnnnnnnnnnnnnnnnnnnnnnnnnnnnnnnnnnnnnnnnnnnnnnnnnnnnnnnnnnnnnnnnnnnnnnnnnnnnnnnnnnnnnnnnnnnnnnnnnnnnnnnnnnnnnnnnnnnnnnnnnnnnnnnnnnnnnnnnnnnnnnnnnnnnnnnnnnnnnnnnnnnnnnnnnnnnnnnnnnnnnnnnnnnnnnnnnnnnnnnnnnnnnnnnnnnnnnnnnnnnnnnnnnnnnnnnnnnnnnnnnnnnnnnnnnnnnnnnnnnnnnnnnnnnnnnnnnnnnnnnnnnnnnnnnnnnnnnnnnnnnnnnnnnnnnnnnnnnnnnnnnnnnnnnnnnnnnnnnnnnnnnnnnnnnnnnnnnnnnnnnnnnnnnnnnnnnnnnnnnnnnnnnnnnnnnnnnnnnnnnnnnnnnnnnnnnnnnnnnnnnnnnnnnnnnnnnnnnnnnnnnnnnnnnnnnnnnnnnnnnnnnnnnnnnnnnnnnnnnnnnnnnnnnnnnnnnnnnnnnnnnnnnnnnnnnnnnnnnnnnnnnnnnnnnnnnnnnnnnnnnnnnnnnnnnnnnnnnnnnnnnnnnnnnnnnnnnnnnnnnnnnnnnnnnnnnnnnnnnnnnnnnnnnnnnnnnnnnnnnnnnnnnnnnnnnnnnnnnnnnnnnnnnnnnnnnnnnnnnnnnnnnnnnnnnnnnnnnnnnnnnnnnnnnnnnnnnnnnnnnnnnnnnnnnnnnnnnnnnnnnnnnnnnnnnnnnnnnnnnnnnnnnnnnnnnnnnnnnnnnnnnnnnnnnnnnnnnnnnnnnnnnnnnnnnnnnnnnnnnnnnnnnnnnnnnnnnnnnnnnnnnnnnnnnnnnnnnnnnnnnnnnnnnnnnnnnnnnnnnnnnnnnnnnnnnnnnnnnnnnnnnnnnnnnnnnnnnnnnnnnnnnnnnnnnnnnnnnnnnnnnnnnnnnnnnnnnnnnnnnnnnnnnnnnnnnnnnnnnnnnnnnnnnnnnnnnnnnnnnnnnnnnnnnnnnnnnnnnnnnnnnnnnnnnnnnnnnnnnnnnnnnnnnnnnnnnnnnnnnnnnnnnnnnnnnnnnnnnnnnnnnnnnnnnnnnnnnnnnnnnnnnnnnnnnnnnnnnnnnnnnnnnnnnnnnnnnnnnnnnnnnnnnnnnnnnnnnnnnnnnnnnnnnnnnnnnnnnnnnnnnnnnnnnnnnnnnnnnnnnnnnnnnnnnnnnnnnnnnnnnnnnnnnnnnnnnnnnnnnnnnnnnnnnnnnnnnnnnnnnnnnnnnnnnnnnnnnnnnnnnnnnnnnnnnnnnnnnnnnnnnnnnnnnnnnnnnnnnnnnnnnnnnnnnnnnnnnnnnnnnnnnnnnnnnnnnnnnnnnnnnnnnnnnnnnnnnnnnnnnnnnnnnnnnnnnnnnnnnnnnnnnnnnnnnnnnnnnnnnnnnnnnnnnnnnnnnnnnnnnnnnnnnnnnnnnnnnnnnnnnnnnnnnnnnnnnnnnnnnnnnnnnnnnnnnnnnnnnnnnnnnnnnnnnnnnnnnnnnnnnnnnnnnnnnnnnnnnnnnnnnnnnnnnnnnnnnnnnnnnnnnnnnnnnnnnnnnnnnnnnnnnnnnnnnnnnnnnnnnnnnnnnnnnnnnnnnnnnnnnnnnnnnnnnnnnnnnnnnnnnnnnnnnnnnnnnnnnnnnnnnnnnnnnnnnnnnnnnnnnnnnnnnnnnnnnnnnnnnnnnnnnnnnnnnnnnnnnnnnnnnnnnnnnnnnnnnnnnnnnnnnnnnnnnnnnnnnnnnnnnnnnnnnnnnnnnnnnnnnnnnnnnnnnnnnnnnnnnnnnnnnnnnnnnnnnnnnnnnnnnnnnnnnnnnnnnnnnnnnnnnnnnnnnnnnnnnnnnnnnnnnnnnnnnnnnnnnnnnnnnnnnnnnnnnnnnnnnnnnnnnnnnnnnnnnnnnnnnnnnnnnnnnnnnnnnnnnnnnnnnnnnnnnnnnnnnnnnnnnnnnnnnnnnnnnnnnnnnnnnnnnnnnnnnnnnnnnnnnnnnnnnnnnnnnnnnnnnnnnnnnnnnnnnnnnnnnnnnnnnnnnnnnnnnnnnnnnnnnnnnnnnnnnnnnnnnnnnnnnnnnnnnnnnnnnnnnnnnnnnnnnnnnnnnnnnnnnnnnnnnnnnnnnnnnnnnnnnnnnnnnnnnnnnnnnnnnnnnnnnnnnnnnnnnnnnnnnnnnnnnnnnnnnnnnnnnnnnnnnnnnnnnnnnnnnnnnnnnnnnnnnnnnnnnnnnnnnnnnnnnnnnnnnnnnnnnnnnnnnnnnnnnnnnnnnnnnnnnnnnnnnnnnnnnnnnnnnnnnnnnnnnnnnnnnnnnnnnnnnnnnnnnnnnnnnnnnnnnnnnnnnnnnnnnnnnnnnnnnnnnnnnnnnnnnnnnnnnnnnnnnnnnnnnnnnnnnnnnnnnnnnnnnnnnnnnnnnnnnnnnnnnnnnnnnnnnnnnnnnnnnnnnnnnnnnnnnnnnnnnnnnnnnnnnnnnnnnnnnnnnnnnnnnnnnnnnnnnnnnnnnnnnnnnnnnnnnnnnnnnnnnnnnnnnnnnnnnnnnnnnnnnnnnnnnnnnnnnnnnnnnnnnnnnnnnnnnnnnnnnnnnnnnnnnnnnnnnnnnnnnnnnnnnnnnnnnnnnnnnnnnnnnnnnnnnnnnnnnnnnnnnnnnnnnnnnnnnnnnnnnnnnnnnnnnnnnnnnnnnnnnnnnnnnnnnnnnnnnnnnnnnnnnnnnnnnnnnnnnnnnnnnnnnnnnnnnnnnnnnnnnnnnnnnnnnnnnnnnnnnnnnnnnnnnnnnnnnnnnnnnnnnnnnnnnnnnnnnnnnnnnnnnnnnnnnnnnnnnnnnnnnnnnnnnnnnnnnnnnnnnnnnnnnnnnnnnnnnnnnnnnnnnnnnnnnnnnnnnnnnnnnnnnnnnnnnnnnnnnnnnnnnnnnnnnnnnnnnnnnnnnnnnnnnnnnnnnnnnnnnnnnnnnnnnnnnnnnnnnnnnnnnnnnnnnnnnnnnnnnnnnnnnnnnnnnnnnnnnnnnnnnnnnnnnnnnnnnnnnnnnnnnnnnnnnnnnnnnnnnnnnnnnnnnnnnnnnnnnnnnnnnnnnnnnnnnnnnnnnnnnnnnnnnnnnnnnnnnnnnnnnnnnnnnnnnnnnnnnnnnnnnnnnnnnnnnnnnnnnnnnnnnnnnnnnnnnnnnnnnnnnnnnnnnnnnnnnnnnnnnnnnnnnnnnnnnnnnnnnnnnnnnnnnnnnnnnnnnnnnnnnnnnnnnnnnnnnnnnnnnnnnnnnnnnnnnnnnnnnnnnnnnnnnnnnnnnnnnnnnnnnnnnnnnnnnnnnnnnnnnnnnnnnnnnnnnnnnnnnnnnnnnnnnnnnnnnnnnnnnnnnnnnnnnnnnnnnnnnnnnnnnnnnnnnnnnnnnnnnnnnnnnnnnnnnnnnnnnnnnnnnnnnnnnnnnnnnnnnnnnnnnnnnnnnnnnnnnnnnnnnnnnnnnnnnnnnnnnnnnnnnnnnnnnnnnnnnnnnnnnnnnnnnnnnnnnnnnnnnnnnnnnnnnnnnnnnnnnnnnnnnnnnnnnnnnnnnnnnnnnnnnnnnnnnnnnnnnnnnnnnnnnnnnnnnnnnnnnnnnnnnnnnnnnnnnnnnnnnnnnnnnnnnnnnnnnnnnnnnnnnnnnnnnnnnnnnnnnnnnnnnnnnnnnnnnnnnnnnnnnnnnnnnnnnnnnnnnnnnnnnnnnnnnnnnnnnnnnnnnnnnnnnnnnnnnnnnnnnnnnnnnnnnnnnnnnnnnnnnnnnnnnnnnnnnnnnnnnnnnnnnnnnnnnnnnnnnnnnnnnnnnnnnnnnnnnnnnnnnnnnnnnnnnnnnnnnnnnnnnnnnnnnnnnnnnnnnnnnnnnnnnnnnnnnnnnnnnnnnnnnnnnnnnnnnnnnnnnnnnnnnnnnnnnnnnnnnnnnnnnnnnnnnnnnnnnnnnnnnnnnnnnnnnnnnnnnnnnnnnnnnnnnnnnnnnnnnnnnnnnnnnnnnnnnnnnnnnnnnnnnnnnnnnnnnnnnnnnnnnnnnnnnnnnnnnnnnnnnnnnnnnnnnnnnnnnnnnnnnnnnnnnnnnnnnnnnnnnnnnnnnnnnnnnnnnnnnnnnnnnnnnnnnnnnnnnnnnnnnnnnnnnnnnnnnnnnnnnnnnnnnnnnnnnnnnnnnnnnnnnnnnnnnnnnnnnnnnnnnnnnnnnnnnnnnnnnnnnnnnnnnnnnnnnnnnnnnnnnnnnnnnnnnnnnnnnnnnnnnnnnnnnnnnnnnnnnnnnnnnnnnnnnnnnnnnnnnnnnnnnnnnnnnnnnnnnnnnnnnnnnnnnnnnnnnnnnnnnnnnnnnnnnnnnnnnnnnnnnnnnnnnnnnnnnnnnnnnnnnnnnnnnnnnnnnnnnnnnnnnnnnnnnnnnnnnnnnnnnnnnnnnnnnnnnnnnnnnnnnnnnnnnnnnnnnnnnnnnnnnnnnnnnnnnnnnnnnnnnnnnnnnnnnnnnnnnnnnnnnnnnnnnnnnnnnnnnnnnnnnnnnnnnnnnnnnnnnnnnnnnnnnnnnnnnnnnnnnnnnnnnnnnnnnnnnnnnnnnnnnnnnnnnnnnnnnnnnnnnnnnnnnnnnnnnnnnnnnnnnnnnnnnnnnnnnnnnnnnnnnnnnnnnnnnnnnnnnnnnnnnnnnnnnnnnnnnnnnnnnnnnnnnnnnnnnnnnnnnnnnnnnnnnnnnnnnnnnnnnnnnnnnnnnnnnnnnnnnnnnnnnnnnnnnnnnnnnnnnnnnnnnnnnnnnnnnnnnnnnnnnnnnnnnnnnnnnnnnnnnnnnnnnnnnnnnnnnnnnnnnnnnnnnnnnnnnnnnnnnnnnnnnnnnnnnnnnnnnnnnnnnnnnnnnnnnnnnnnnnnnnnnnnnnnnnnnnnnnnnnnnnnnnnnnnnnnnnnnnnnnnnnnnnnnnnnnnnnnnnnnnnnnnnnnnnnnnnnnnnnnnnnnnnnnnnnnnnnnnnnnnnnnnnnnnnnnnnnnnnnnnnnnnnnnnnnnnnnnnnnnnnnnnnnnnnnnnnnnnnnnnnnnnnnnnnnnnnnnnnnnnnnnnnnnnnnnnnnnnnnnnnnnnnnnnnnnnnnnnnnnnnnnnnnnnnnnnnnnnnnnnnnnnnnnnnnnnnnnnnnnnnnnnnnnnnnnnnnnnnnnnnnnnnnnnnnnnnnnnnnnnnnnnnnnnnnnnnnnnnnnnnnnnnnnnnnnnnnnnnnnnnnnnnnnnnnnnnnnnnnnnnnnnnnnnnnnnnnnnnnnnnnnnnnnnnnnnnnnnnnnnnnnnnnnnnnnnnnnnnnnnnnnnnnnnnnnnnnnnnnnnnnnnnnnnnnnnnnnnnnnnnnnnnnnnnnnnnnnnnnnnnnnnnnnnnnnnnnnnnnnnnnnnnnnnnnnnnnnnnnnnnnnnnnnnnnnnnnnnnnnnnnnnnnnnnnnnnnnnnnnnnnnnnnnnnnnnnnnnnnnnnnnnnnnnnnnnnnnnnnnnnnnnnnnnnnnnnnnnnnnnnnnnnnnnnnnnnnnnnnnnnnnnnnnnnnnnnnnnnnnnnnnnnnnnnnnnnnnnnnnnnnnnnnnnnnnnnnnnnnnnnnnnnnnnnnnnnnnnnnnnnnnnnnnnnnnnnnnnnnnnnnnnnnnnnnnnnnnnnnnnnnnnnnnnnnnnnnnnnnnnnnnnnnnnnnnnnnnnnnnnnnnnnnnnnnnnnnnnnnnnnnnnnnnnnnnnnnnnnnnnnnnnnnnnnnnnnnnnnnnnnnnnnnnnnnnnnnnnnnnnnnnnnnnnnnnnnnnnnnnnnnnnnnnnnnnnnnnnnnnnnnnnnnnnnnnnnnnnnnnnnnnnnnnnnnnnnnnnnnnnnnnnnnnnnnnnnnnnnnnnnnnnnnnnnnnnnnnnnnnnnnnnnnnnnnnnnnnnnnnnnnnnnnnnnnnnnnnnnnnnnnnnnnnnnnnnnnnnnnnnnnnnnnnnnnnnnnnnnnnnnnnnnnnnnnnnnnnnnnnnnnnnnnnnnnnnnnnnnnnnnnnnnnnnnnnnnnnnnnnnnnnnnnnnnnnnnnnnnnnnnnnnnnnnnnnnnnnnnnnnnnnnnnnnnnnnnnnnnnnnnnnnnnnnnnnnnnnnnnnnnnnnnnnnnnnnnnnnnnnnnnnnnnnnnnnnnnnnnnnnnnnnnnnnnnnnnnnnnnnnnnnnnnnnnnnnnnnnnnnnnnnnnnnnnnnnnnnnnnnnnnnnnnnnnnnnnnnnnnnnnnnnnnnnnnnnnnnnnnnnnnnnnnnnnnnnnnnnnnnnnnnnnnnnnnnnnnnnnnnnnnnnnnnnnnnnnnnnnnnnnnnnnnnnnnnnnnnnnnnnnnnnnnnnnnnnnnnnnnnnnnnnnnnnnnnnnnnnnnnnnnnnnnnnnnnnnnnnnnnnnnnnnnnnnnnnnnnnnnnnnnnnnnnnnnnnnnnnnnnnnnnnnnnnnnnnnnnnnnnnnnnnnnnnnnnnnnnnnnnnnnnnnnnnnnnnnnnnnnnnnnnnnnnnnnnnnnnnnnnnnnnnnnnnnnnnnnnnnnnnnnnnnnnnnnnnnnnnnnnnnnnnnnnnnnnnnnnnnnnnnnnnnnnnnnnnnnnnnnnnnnnnnnnnnnnnnnnnnnnnnnnnnnnnnnnnnnnnnnnnnnnnnnnnnnnnnnnnnnnnnnnnnnnnnnnnnnnnnnnnnnnnnnnnnnnnnnnnnnnnnnnnnnnnnnnnnnnnnnnnnnnnnnnnnnnnnnnnnnnnnnnnnnnnnnnnnnnnnnnnnnnnnnnnnnnnnnnnnnnnnnnnnnnnnnnnnnnnnnnnnnnnnnnnnnnnnnnnnnnnnnnnnnnnnnnnnnnnnnnnnnnnnnnnnnnnnnnnnnnnnnnnnnnnnnnnnnnnnnnnnnnnnnnnnnnnnnnnnnnnnnnnnnnnnnnnnnnnnnnnnnnnnnnnnnnnnnnnnnnnnnnnnnnnnnnnnnnnnnnnnnnnnnnnnnnnnnnnnnnnnnnnnnnnnnnnnnnnnnnnnnnnnnnnnnnnnnnnnnnnnnnnnnnnnnnnnnnnnnnnnnnnnnnnnnnnnnnnnnnnnnnnnnnnnnnnnnnnnnnnnnnnnnnnnnnnnnnnnnnnnnnnnnnnnnnnnnnnnnnnnnnnnnnnnnnnnnnnnnnnnnnnnnnnnnnnnnnnnnnnnnnnnnnnnnnnnnnnnnnnnnnnnnnnnnnnnnnnnnnnnnnnnnnnnnnnnnnnnnnnnnnnnnnnnnnnnnnnnnnnnnnnnnnnnnnnnnnnnnnnnnnnnnnnnnnnnnnnnnnnnnnnnnnnnnnnnnnnnnnnnnnnnnnnnnnnnnnnnnnnnnnnnnnnnnnnnnnnnnnnnnnnnnnnnnnnnnnnnnnnnnnnnnnnnnnnnnnnnnnnnnnnnnnnnnnnnnnnnnnnnnnnnnnnnnnnnnnnnnnnnnnnnnnnnnnnnnnnnnnnnnnnnnnnnnnnnnnnnnnnnnnnnnnnnnnnnnnnnnnnnnnnnnnnnnnnnnnnnnnnnnnnnnnnnnnnnnnnnnnnnnnnnnnnnnnnnnnnnnnnnnnnnnnnnnnnnnnnnnnnnnnnnnnnnnnnnnnnnnnnnnnnnnnnnnnnnnnnnnnnnnnnnnnnnnnnnnnnnnnnnnnnnnnnnnnnnnnnnnnnnnnnnnnnnnnnnnnnnnnnnnnnnnnnnnnnnnnnnnnnnnnnnnnnnnnnnnnnnnnnnnnnnnnnnnnnnnnnnnnnnnnnnnnnnnnnnnnnnnnnnnnnnnnnnnnnnnnnnnnnnnnnnnnnnnnnnnnnnnnnnnnnnnnnnnnnnnnnnnnnnnnnnnnnnnnnnnnnnnnnnnnnnnnnnnnnnnnnnnnnnnnnnnnnnnnnnnnnnnnnnnnnnnnnnnnnnnnnnnnnnnnnnnnnnnnnnnnnnnnnnnnnnnnnnnnnnnnnnnnnnnnnnnnnnnnnnnnnnnnnnnnnnnnnnnnnnnnnnnnnnnnnnnnnnnnnnnnnnnnnnnnnnnnnnnnnnnnnnnnnnnnnnnnnnnnnnnnnnnnnnnnnnnnnnnnnnnnnnnnnnnnnnnnnnnnnnnnnnnnnnnnnnnnnnnnnnnnnnnnnnnnnnnnnnnnnnnnnnnnnnnnnnnnnnnnnnnnnnnnnnnnnnnnnnnnnnnnnnnnnnnnnnnnnnnnnnnnnnnnnnnnnnnnnnnnnnnnnnnnnnnnnnnnnnnnnnnnnnnnnnnnnnnnnnnnnnnnnnnnnnnnnnnnnnnnnnnnnnnnnnnnnnnnnnnnnnnnnnnnnnnnnnnnnnnnnnnnnnnnnnnnnnnnnnnnnnnnnnnnnnnnnnnnnnnnnnnnnnnnnnnnnnnnnnnnnnnnnnnnnnnnnnnnnnnnnnnnnnnnnnnnnnnnnnnnnnnnnnnnnnnnnnnnnnnnnnnnnnnnnnnnnnnnnnnnnnnnnnnnnnnnnnnnnnnnnnnnnnnnnnnnnnnnnnnnnnnnnnnnnnnnnnnnnnnnnnnnnnnnnnnnnnnnnnnnnnnnnnnnnnnnnnnnnnnnnnnnnnnnnnnnnnnnnnnnnnnnnnnnnnnnnnnnnnnnnnnnnnnnnnnnnnnnnnnnnnnnnnnnnnnnnnnnnnnnnnnnnnnnnnnnnnnnnnnnnnnnnnnnnnnnnnnnnnnnnnnnnnnnnnnnnnnnnnnnnnnnnnnnnnnnnnnnnnnnnnnnnnnnnnnnnnnnnnnnnnnnnnnnnnnnnnnnnnnnnnnnnnnnnnnnnnnnnnnnnnnnnnnnnnnnnnnnnnnnnnnnnnnnnnnnnnnnnnnnnnnnnnnnnnnnnnnnnnnnnnnnnnnnnnnnnnnnnnnnnnnnnnnnnnnnnnnnnnnnnnnnnnnnnnnnnnnnnnnnnnnnnnnnnnnnnnnnnnnnnnnnnnnnnnnnnnnnnnnnnnnnnnnnnnnnnnnnnnnnnnnnnnnnnnnnnnnnnnnnnnnnnnnnnnnnnnnnnnnnnnnnnnnnnnnnnnnnnnnnnnnnnnnnnnnnnnnnnnnnnnnnnnnnnnnnnnnnnnnnnnnnnnnnnnnnnnnnnnnnnnnnnnnnnnnnnnnnnnnnnnnnnnnnnnnnnnnnnnnnnnnnnnnnnnnnnnnnnnnnnnnnnnnnnnnnnnnnnnnnnnnnnnnnnnnnnnnnnnnnnnnnnnnnnnnnnnnnnnnnnnnnnnnnnnnnnnnnnnnnnnnnnnnnnnnnnnnnnnnnnnnnnnnnnnnnnnnnnnnnnnnnnnnnnnnnnnnnnnnnnnnnnnnnnnnnnnnnnnnnnnnnnnnnnnnnnnnnnnnnnnnnnnnnnnnnnnnnnnnnnnnnnnnnnnnnnnnnnnnnnnnnnnnnnnnnnnnnnnnnnnnnnnnnnnnnnnnnnnnnnnnnnnnnnnnnnnnnnnnnnnnnnnnnnnnnnnnnnnnnnnnnnnnnnnnnnnnnnnnnnnnnnnnnnnnnnnnnnnnnnnnnnnnnnnnnnnnnnnnnnnnnnnnnnnnnnnnnnnnnnnnnnnnnnnnnnnnnnnnnnnnnnnnnnnnnnnnnnnnnnnnnnnnnnnnnnnnnnnnnnnnnnnnnnnnnnnnnnnnnnnnnnnnnnnnnnnnnnnnnnnnnnnnnnnnnnnnnnnnnnnnnnnnnnnnnnnnnnnnnnnnnnnnnnnnnnnnnnnnnnnnnnnnnnnnnnnnnnnnnnnnnnnnnnnnnnnnnnnnnnnnnnnnnnnnnnnnnnnnnnnnnnnnnnnnnnnnnnnnnnnnnnnnnnnnnnnnnnnnnnnnnnnnnnnnnnnnnnnnnnnnnnnnnnnnnnnnnnnnnnnnnnnnnnnnnnnnnnnnnnnnnnnnnnnnnnnnnnnnnnnnnnnnnnnnnnnnnnnnnnnnnnnnnnnnnnnnnnnnnnnnnnnnnnnnnnnnnnnnnnnnnnnnnnnnnnnnnnnnnnnnnnnnnnnnnnnnnnnnnnnnnnnnnnnnnnnnnnnnnnnnnnnnnnnnnnnnnnnnnnnnnnnnnnnnnnnnnnnnnnnnnnnnnnnnnnnnnnnnnnnnnnnnnnnnnnnnnnnnnnnnnnnnnnnnnnnnnnnnnnnnnnnnnnnnnnnnnnnnnnnnnnnnnnnnnnnnnnnnnnnnnnnnnnnnnnnnnnnnnnnnnnnnnnnnnnnnnnnnnnnnnnnnnnnnnnnnnnnnnnnnnnnnnnnnnnnnnnnnnnnnnnnnnnnnnnnnnnnnnnnnnnnnnnnnnnnnnnnnnnnnnnnnnnnnnnnnnnnnnnnnnnnnnnnnnnnnnnnnnnnnnnnnnnnnnnnnnnnnnnnnnnnnnnnnnnnnnnnnnnnnnnnnnnnnnnnnnnnnnnnnnnnnnnnnnnnnnnnnnnnnnnnnnnnnnnnnnnnnnnnnnnnnnnnnnnnnnnnnnnnnnnnnnnnnnnnnnnnnnnnnnnnnnnnnnnnnnnnnnnnnnnnnnnnnnnnnnnnnnnnnnnnnnnnnnnnnnnnnnnnnnnnnnnnnnnnnnnnnnnnnnnnnnnnnnnnnnnnnnnnnnnnnnnnnnnnnnnnnnnnnnnnnnnnnnnnnnnnnnnnnnnnnnnnnnnnnnnnnnnnnnnnnnnnnnnnnnnnnnnnnnnnnnnnnnnnnnnnnnnnnnnnnnnnnnnnnnnnnnnnnnnnnnnnnnnnnnnnnnnnnnnnnnnnnnnnnnnnnnnnnnnnnnnnnnnnnnnnnnnnnnnnnnnnnnnnnnnnnnnnnnnnnnnnnnnnnnnnnnnnnnnnnnnnnnnnnnnnnnnnnnnnnnnnnnnnnnnnnnnnnnnnnnnnnnnnnnnnnnnnnnnnnnnnnnnnnnnnnnnnnnnnnnnnnnnnnnnnnnnnnnnnnnnnnnnnnnnnnnnnnnnnnnnnnnnnnnnnnnnnnnnnnnnnnnnnnnnnnnnnnnnnnnnnnnnnnnnnnnnnnnnnnnnnnnnnnnnnnnnnnnnnnnnnnnnnnnnnnnnnnnnnnnnnnnnnnnnnnnnnnnnnnnnnnnnnnnnnnnnnnnnnnnnnnnnnnnnnnnnnnnnnnnnnnnnnnnnnnnnnnnnnnnnnnnnnnnnnnnnnnnnnnnnnnnnnnnnnnnnnnnnnnnnnnnnnnnnnnnnnnnnnnnnnnnnnnnnnnnnnnnnnnnnnnnnnnnnnnnnnnnnnnnnnnnnnnnnnnnnnnnnnnnnnnnnnnnnnnnnnnnnnnnnnnnnnnnnnnnnnnnnnnnnnnnnnnnnnnnnnnnnnnnnnnnnnnnnnnnnnnnnnnnnnnnnnnnnnnnnnnnnnnnnnnnnnnnnnnnnnnnnnnnnnnnnnnnnnnnnnnnnnnnnnnnnnnnnnnnnnnnnnnnnnnnnnnnnnnnnnnnnnnnnnnnnnnnnnnnnnnnnnnnnnnnnnnnnnnnnnnnnnnnnnnnnnnnnnnnnnnnnnnnnnnnnnnnnnnnnnnnnnnnnnnnnnnnnnnnnnnnnnnnnnnnnnnnnnnnnnnnnnnnnnnnnnnnnnnnnnnnnnnnnnnnnnnnnnnnnnnnnnnnnnnnnnnnnnnnnnnnnnnnnnnnnnnnnnnnnnnnnnnnnnnnnnnnnnnnnnnnnnnnnnnnnnnnnnnnnnnnnnnnnnnnnnnnnnnnnnnnnnnnnnnnnnnnnnnnnnnnnnnnnnnnnnnnnnnnnnnnnnnnnnnnnnnnnnnnnnnnnnnnnnnnnnnnnnnnnnnnnnnnnnnnnnnnnnnnnnnnnnnnnnnnnnnnnnnnnnnnnnnnnnnnnnnnnnnnnnnnnnnnnnnnnnnnnnnnnnnnnnnnnnnnnnnnnnnnnnnnnnnnnnnnnnnnnnnnnnnnnnnnnnnnnnnnnnnnnnnnnnnnnnnnnnnnnnnnnnnnnnnnnnnnnnnnnnnnnnnnnnnnnnnnnnnnnnnnnnnnnnnnnnnnnnnnnnnnnnnnnnnnnnnnnnnnnnnnnnnnnnnnnnnnnnnnnnnnnnnnnnnnnnnnnnnnnnnnnnnnnnnnnnnnnnnnnnnnnnnnnnnnnnnnnnnnnnnnnnnnnnnnnnnnnnnnnnnnnnnnnnnnnnnnnnnnnnnnnnnnnnnnnnnnnnnnnnnnnnnnnnnnnnnnnnnnnnnnnnnnnnnnnnnnnnnnnnnnnnnnnnnnnnnnnnnnnnnnnnnnnnnnnnnnnnnnnnnnnnnnnnnnnnnnnnnnnnnnnnnnnnnnnnnnnnnnnnnnnnnnnnnnnnnnnnnnnnnnnnnnnnnnnnnnnnnnnnnnnnnnnnnnnnnnnnnnnnnnnnnnnnnnnnnnnnnnnnnnnnnnnnnnnnnnnnnnnnnnnnnnnnnnnnnnnnnnnnnnnnnnnnnnnnnnnnnnnnnnnnnnnnnnnnnnnnnnnnnnnnnnnnnnnnnnnnnnnnnnnnnnnnnnnnnnnnnnnnnnnnnnnnnnnnnnnnnnnnnnnnnnnnnnnnnnnnnnnnnnnnnnnnnnnnnnnnnnnnnnnnnnnnnnnnnnnnnnnnnnnnnnnnnnnnnnnnnnnnnnnnnnnnnnnnnnnnnnnnnnnnnnnnnnnnnnnnnnnnnnnnnnnnnnnnnnnnnnnnnnnnnnnnnnnnnnnnnnnnnnnnnnnnnnnnnnnnnnnnnnnnnnnnnnnnnnnnnnnnnnnnnnnnnnnnnnnnnnnnnnnnnnnnnnnnnnnnnnnnnnnnnnnnnnnnnnnnnnnnnnnnnnnnnnnnnnnnnnnnnnnnnnnnnnnnnnnnnnnnnnnnnnnnnnnnnnnnnnnnnnnnnnnnnnnnnnnnnnnnnnnnnnnnnnnnnnnnnnnnnnnnnnnnnnnnnnnnnnnnnnnnnnnnnnnnnnnnnnnnnnnnnnnnnnnnnnnnnnnnnnnnnnnnnnnnnnnnnnnnnnnnnnnnnnnnnnnnnnnnnnnnnnnnnnnnnnnnnnnnnnnnnnnnnnnnnnnnnnnnnnnnnnnnnnnnnnnnnnnnnnnnnnnnnnnnnnnnnnnnnnnnnnnnnnnnnnnnnnnnnnnnnnnnnnnnnnnnnnnnnnnnnnnnnnnnnnnnnnnnnnnnnnnnnnnnnnnnnnnnnnnnnnnnnnnnnnnnnnnnnnnnnnnnnnnnnnnnnnnnnnnnnnnnnnnnnnnnnnnnnnnnnnnnnnnnnnnnnnnnnnnnnnnnnnnnnnnnnnnnnnnnnnnnnnnnnnnnnnnnnnnnnnnnnnnnnnnnnnnnnnnnnnnnnnnnnnnnnnnnnnnnnnnnnnnnnnnnnnnnnnnnnnnnnnnnnnnnnnnnnnnnnnnnnnnnnnnnnnnnnnnnnnnnnnnnnnnnnnnnnnnnnnnnnnnnnnnnnnnnnnnnnnnnnnnnnnnnnnnnnnnnnnnnnnnnnnnnnnnnnnnnnnnnnnnnnnnnnnnnnnnnnnnnnnnnnnnnnnnnnnnnnnnnnnnnnnnnnnnnnnnnnnnnnnnnnnnnnnnnnnnnnnnnnnnnnnnnnnnnnnnnnnnnnnnnnnnnnnnnnnnnnnnnnnnnnnnnnnnnnnnnnnnnnnnnnnnnnnnnnnnnnnnnnnnnnnnnnnnnnnnnnnnnnnnnnnnnnnnnnnnnnnnnnnnnnnnnnnnnnnnnnnnnnnnnnnnnnnnnnnnnnnnnnnnnnnnnnnnnnnnnnnnnnnnnnnnnnnnnnnnnnnnnnnnnnnnnnnnnnnnnnnnnnnnnnnnnnnnnnnnnnnnnnnnnnnnnnnnnnnnnnnnnnnnnnnnnnnnnnnnnnnnnnnnnnnnnnnnnnnnnnnnnnnnnnnnnnnnnnnnnnnnnnnnnnnnnnnnnnnnnnnnnnnnnnnnnnnnnnnnnnnnnnnnnnnnnnnnnnnnnnnnnnnnnnnnnnnnnnnnnnnnnnnnnnnnnnnnnnnnnnnnnnnnnnnnnnnnnnnnnnnnnnnnnnnnnnnnnnnnnnnnnnnnnnnnnnnnnnnnnnnnnnnnnnnnnnnnnnnnnnnnnnnnnnnnnnnnnnnnnnnnnnnnnnnnnnnnnnnnnnnnnnnnnnnnnnnnnnnnnnnnnnnnnnnnnnnnnnnnnnnnnnnnnnnnnnnnnnnnnnnnnnnnnnnnnnnnnnnnnnnnnnnnnnnnnnnnnnnnnnnnnnnnnnnnnnnnnnnnnnnnnnnnnnnnnnnnnnnnnnnnnnnnnnnnnnnnnnnnnnnnnnnnnnnnnnnnnnnnnnnnnnnnnnnnnnnnnnnnnnnnnnnnnnnnnnnnnnnnnnnnnnnnnnnnnnnnnnnnnnnnnnnnnnnnnnnnnnnnnnnnnnnnnnnnnnnnnnnnnnnnnnnnnnnnnnnnnnnnnnnnnnnnnnnnnnnnnnnnnnnnnnnnnnnnnnnnnnnnnnnnnnnnnnnnnnnnnnnnnnnnnnnnnnnnnnnnnnnnnnnnnnnnnnnnnnnnnnnnnnnnnnnnnnnnnnnnnnnnnnnnnnnnnnnnnnnnnnnnnnnnnnnnnnnnnnnnnnnnnnnnnnnnnnnnnnnnnnnnnnnnnnnnnnnnnnnnnnnnnnnnnnnnnnnnnnnnnnnnnnnnnnnnnnnnnnnnnnnnnnnnnnnnnnnnnnnnnnnnnnnnnnnnnnnnnnnnnnnnnnnnnnnnnnnnnnnnnnnnnnnnnnnnnnnnnnnnnnnnnnnnnnnnnnnnnnnnnnnnnnnnnnnnnnnnnnnnnnnnnnnnnnnnnnnnnnnnnnnnnnnnnnnnnnnnnnnnnnnnnnnnnnnnnnnnnnnnnnnnnnnnnnnnnnnnnnnnnnnnnnnnnnnnnnnnnnnnnnnnnnnnnnnnnnnnnnnnnnnnnnnnnnnnnnnnnnnnnnnnnnnnnnnnnnnnnnnnnnnnnnnnnnnnnnnnnnnnnnnnnnnnnnnnnnnnnnnnnnnnnnnnnnnnnnnnnnnnnnnnnnnnnnnnnnnnnnnnnnnnnnnnnnnnnnnnnnnnnnnnnnnnnnnnnnnnnnnnnnnnnnnnnnnnnnnnnnnnnnnnnnnnnnnnnnnnnnnnnnnnnnnnnnnnnnnnnnnnnnnnnnnnnnnnnnnnnnnnnnnnnnnnnnnnnnnnnnnnnnnnnnnnnnnnnnnnnnnnnnnnnnnnnnnnnnnnnnnnnnnnnnnnnnnnnnnnnnnnnnnnnnnnnnnnnnnnnnnnnnnnnnnnnnnnnnnnnnnnnnnnnnnnnnnnnnnnnnnnnnnnnnnnnnnnnnnnnnnnnnnnnnnnnnnnnnnnnnnnnnnnnnnnnnnnnnnnnnnnnnnnnnnnnnnnnnnnnnnnnnnnnnnnnnnnnnnnnnnnnnnnnnnnnnnnnnnnnnnnnnnnnnnnnnnnnnnnnnnnnnnnnnnnnnnnnnnnnnnnnnnnnnnnnnnnnnnnnnnnnnnnnnnnnnnnnnnnnnnnnnnnnnnnnnnnnnnnnnnnnnnnnnnnnnnnnnnnnnnnnnnnnnnnnnnnnnnnnnnnnnnnnnnnnnnnnnnnnnnnnnnnnnnnnnnnnnnnnnnnnnnnnnnnnnnnnnnnnnnnnnnnnnnnnnnnnnnnnnnnnnnnnnnnnnnnnnnnnnnnnnnnnnnnnnnnnnnnnnnnnnnnnnnnnnnnnnnnnnnnnnnnnnnnnnnnnnnnnnnnnnnnnnnnnnnnnnnnnnnnnnnnnnnnnnnnnnnnnnnnnnnnnnnnnnnnnnnnnnnnnnnnnnnnnnnnnnnnnnnnnnnnnnnnnnnnnnnnnnnnnnnnnnnnnnnnnnnnnnnnnnnnnnnnnnnnnnnnnnnnnnnnnnnnnnnnnnnnnnnnnnnnnnnnnnnnnnnnnnnnnnnnnnnnnnnnnnnnnnnnnnnnnnnnnnnnnnnnnnnnnnnnnnnnnnnnnnnnnnnnnnnnnnnnnnnnnnnnnnnnnnnnnnnnnnnnnnnnnnnnnnnnnnnnnnnnnnnnnnnnnnnnnnnnnnnnnnnnnnnnnnnnnnnnnnnnnnnnnnnnnnnnnnnnnnnnnnnnnnnnnnnnnnnnnnnnnnnnnnnnnnnnnnnnnnnnnnnnnnnnnnnnnnnnnnnnnnnnnnnnnnnnnnnnnnnnnnnnnnnnnnnnnnnnnnnnnnnnnnnnnnnnnnnnnnnnnnnnnnnnnnnnnnnnnnnnnnnnnnnnnnnnnnnnnnnnnnnnnnnnnnnnnnnnnnnnnnnnnnnnnnnnnnnnnnnnnnnnnnnnnnnnnnnnnnnnnnnnnnnnnnnnnnnnnnnnnnnnnnnnnnnnnnnnnnnnnnnnnnnnnnnnnnnnnnnnnnnnnnnnnnnnnnnnnnnnnnnnnnnnnnnnnnnnnnnnnnnnnnnnnnnnnnnnnnnnnnnnnnnnnnnnnnnnnnnnnnnnnnnnnnnnnnnnnnnnnnnnnnnnnnnnnnnnnnnnnnnnnnnnnnnnnnnnnnnnnnnnnnnnnnnnnnnnnnnnnnnnnnnnnnnnnnnnnnnnnnnnnnnnnnnnnnnnnnnnnnnnnnnnnnnnnnnnnnnnnnnnnnnnnnnnnnnnnnnnnnnnnnnnnnnnnnnnnnnnnnnnnnnnnnnnnnnnnnnnnnnnnnnnnnnnnnnnnnnnnnnnnnnnnnnnnnnnnnnnnnnnnnnnnnnnnnnnnnnnnnnnnnnnnnnnnnnnnnnnnnnnnnnnnnnnnnnnnnnnnnnnnnnnnnnnnnnnnnnnnnnnnnnnnnnnnnnnnnnnnnnnnnnnnnnnnnnnnnnnnnnnnnnnnnnnnnnnnnnnnnnnnnnnnnnnnnnnnnnnnnnnnnnnnnnnnnnnnnnnnnnnnnnnnnnnnnnnnnnnnnnnnnnnnnnnnnnnnnnnnnnnnnnnnnnnnnnnnnnnnnnnnnnnnnnnnnnnnnnnnnnnnnnnnnnnnnnnnnnnnnnnnnnnnnnnnnnnnnnnnnnnnnnnnnnnnnnnnnnnnnnnnnnnnnnnnnnnnnnnnnnnnnnnnnnnnnnnnnnnnnnnnnnnnnnnnnnnnnnnnnnnnnnnnnnnnnnnnnnnnnnnnnnnnnnnnnnnnnnnnnnnnnnnnnnnnnnnnnnnnnnnnnnnnnnnnnnnnnnnnnnnnnnnnnnnnnnnnnnnnnnnnnnnnnnnnnnnnnnnnnnnnnnnnnnnnnnnnnnnnnnnnnnnnnnnnnnnnnnnnnnnnnnnnnnnnnnnnnnnnnnnnnnnnnnnnnnnnnnnnnnnnnnnnnnnnnnnnnnnnnnnnnnnnnnnnnnnnnnnnnnnnnnnnnnnnnnnnnnnnnnnnnnnnnnnnnnnnnnnnnnnnnnnnnnnnnnnnnnnnnnnnnnnnnnnnnnnnnnnnnnnnnnnnnnnnnnnnnnnnnnnnnnnnnnnnnnnnnnnnnnnnnnnnnnnnnnnnnnnnnnnnnnnnnnnnnnnnnnnnnnnnnnnnnnnnnnnnnnnnnnnnnnnnnnnnnnnnnnnnnnnnnnnnnnnnnnnnnnnnnnnnnnnnnnnnnnnnnnnnnnnnnnnnnnnnnnnnnnnnnnnnnnnnnnnnnnnnnnnnnnnnnnnnnnnnnnnnnnnnnnnnnnnnnnnnnnnnnnnnnnnnnnnnnnnnnnnnnnnnnnnnnnnnnnnnnnnnnnnnnnnnnnnnnnnnnnnnnnnnnnnnnnnnnnnnnnnnnnnnnnnnnnnnnnnnnnnnnnnnnnnnnnnnnnnnnnnnnnnnnnnnnnnnnnnnnnnnnnnnnnnnnnnnnnnnnnnnnnnnnnnnnnnnnnnnnnnnnnnnnnnnnnnnnnnnnnnnnnnnnnnnnnnnnnnnnnnnnnnnnnnnnnnnnnnnnnnnnnnnnnnnnnnnnnnnnnnnnnnnnnnnnnnnnnnnnnnnnnnnnnnnnnnnnnnnnnnnnnnnnnnnnnnnnnnnnnnnnnnnnnnnnnnnnnnnnnnnnnnnnnnnnnnnnnnnnnnnnnnnnnnnnnnnnnnnnnnnnnnnnnnnnnnnnnnnnnnnnnnnnnnnnnnnnnnnnnnnnnnnnnnnnnnnnnnnnnnnnnnnnnnnnnnnnnnnnnnnnnnnnnnnnnnnnnnnnnnnnnnnnnnnnnnnnnnnnnnnnnnnnnnnnnnnnnnnnnnnnnnnnnnnnnnnnnnnnnnnnnnnnnnnnnnnnnnnnnnnnnnnnnnnnnnnnnnnnnnnnnnnnnnnnnnnnnnnnnnnnnnnnnnnnnnnnnnnnnnnnnnnnnnnnnnnnnnnnnnnnnnnnnnnnnnnnnnnnnnnnnnnnnnnnnnnnnnnnnnnnnnnnnnnnnnnnnnnnnnnnnnnnnnnnnnnnnnnnnnnnnnnnnnnnnnnnnnnnnnnnnnnnnnnnnnnnnnnnnnnnnnnnnnnnnnnnnnnnnnnnnnnnnnnnnnnnnnnnnnnnnnnnnnnnnnnnnnnnnnnnnnnnnnnnnnnnnnnnnnnnnnnnnnnnnnnnnnnnnnnnnnnnnnnnnnnnnnnnnnnnnnnnnnnnnnnnnnnnnnnnnnnnnnnnnnnnnnnnnnnnnnnnnnnnnnnnnnnnnnnnnnnnnnnnnnnnnnnnnnnnnnnnnnnnnnnnnnnnnnnnnnnnnnnnnnnnnnnnnnnnnnnnnnnnnnnnnnnnnnnnnnnnnnnnnnnnnnnnnnnnnnnnnnnnnnnnnnnnnnnnnnnnnnnnnnnnnnnnnnnnnnnnnnnnnnnnnnnnnnnnnnnnnnnnnnnnnnnnnnnnnnnnnnnnnnnnnnnnnnnnnnnnnnnnnnnnnnnnnnnnnnnnnnnnnnnnnnnnnnnnnnnnnnnnnnnnnnnnnnnnnnnnnnnnnnnnnnnnnnnnnnnnnnnnnnnnnnnnnnnnnnnnnnnnnnnnnnnnnnnnnnnnnnnnnnnnnnnnnnnnnnnnnnnnnnnnnnnnnnnnnnnnnnnnnnnnnnnnnnnnnnnnnnnnnnnnnnnnnnnnnnnnnnnnnnnnnnnnnnnnnnnnnnnnnnnnnnnnnnnnnnnnnnnnnnnnnnnnnnnnnnnnnnnnnnnnnnnnnnnnnnnnnnnnnnnnnnnnnnnnnnnnnnnnnnnnnnnnnnnnnnnnnnnnnnnnnnnnnnnnnnnnnnnnnnnnnnnnnnnnnnnnnnnnnnnnnnnnnnnnnnnnnnnnnnnnnnnnnnnnnnnnnnnnnnnnnnnnnnnnnnnnnnnnnnnnnnnnnnnnnnnnnnnnnnnnnnnnnnnnnnnnnnnnnnnnnnnnnnnnnnnnnnnnnnnnnnnnnnnnnnnnnnnnnnnnnnnnnnnnnnnnnnnnnnnnnnnnnnnnnnnnnnnnnnnnnnnnnnnnnnnnnnnnnnnnnnnnnnnnnnnnnnnnnnnnnnnnnnnnnnnnnnnnnnnnnnnnnnnnnnnnnnnnnnnnnnnnnnnnnnnnnnnnnnnnnnnnnnnnnnnnnnnnnnnnnnnnnnnnnnnnnnnnnnnnnnnnnnnnnnnnnnnnnnnnnnnnnnnnnnnnnnnnnnnnnnnnnnnnnnnnnnnnnnnnnnnnnnnnnnnnnnnnnnnnnnnnnnnnnnnnnnnnnnnnnnnnnnnnnnnnnnnnnnnnnnnnnnnnnnnnnnnnnnnnnnnnnnnnnnnnnnnnnnnnnnnnnnnnnnnnnnnnnnnnnnnnnnnnnnnnnnnnnnnnnnnnnnnnnnnnnnnnnnnnnnnnnnnnnnnnnnnnnnnnnnnnnnnnnnnnnnnnnnnnnnnnnnnnnnnnnnnnnnnnnnnnnnnnnnnnnnnnnnnnnnnnnnnnnnnnnnnnnnnnnnnnnnnnnnnnnnnnnnnnnnnnnnnnnnnnnnnnnnnnnnnnnnnnnnnnnnnnnnnnnnnnnnnnnnnnnnnnnnnnnnnnnnnnnnnnnnnnnnnnnnnnnnnnnnnnnnnnnnnnnnnnnnnnnnnnnnnnnnnnnnnnnnnnnnnnnnnnnnnnnnnnnnnnnnnnnnnnnnnnnnnnnnnnnnnnnnnnnnnnnnnnnnnnnnnnnnnnnnnnnnnnnnnnnnnnnnnnnnnnnnnnnnnnnnnnnnnnnnnnnnnnnnnnnnnnnnnnnnnnnnnnnnnnnnnnnnnnnnnnnnnnnnnnnnnnnnnnnnnnnnnnnnnnnnnnnnnnnnnnnnnnnnnnnnnnnnnnnnnnnnnnnnnnnnnnnnnnnnnnnnnnnnnnnnnnnnnnnnnnnnnnnnnnnnnnnnnnnnnnnnnnnnnnnnnnnnnnnnnnnnnnnnnnnnnnnnnnnnnnnnnnnnnnnnnnnnnnnnnnnnnnnnnnnnnnnnnnnnnnnnnnnnnnnnnnnnnnnnnnnnnnnnnnnnnnnnnnnnnnnnnnnnnnnnnnnnnnnnnnnnnnnnnnnnnnnnnnnnnnnnnnnnnnnnnnnnnnnnnnnnnnnnnnnnnnnnnnnnnnnnnnnnnnnnnnnnnnnnnnnnnnnnnnnnnnnnnnnnnnnnnnnnnnnnnnnnnnnnnnnnnnnnnnnnnnnnnnnnnnnnnnnnnnnnnnnnnnnnnnnnnnnnnnnnnnnnnnnnnnnnnnnnnnnnnnnnnnnnnnnnnnnnnnnnnnnnnnnnnnnnnnnnnnnnnnnnnnnnnnnnnnnnnnnnnnnnnnnnnnnnnnnnnnnnnnnnnnnnnnnnnnnnnnnnnnnnnnnnnnnnnnnnnnnnnnnnnnnnnnnnnnnnnnnnnnnnnnnnnnnnnnnnnnnnnnnnnnnnnnnnnnnnnnnnnnnnnnnnnnnnnnnnnnnnnnnnnnnnnnnnnnnnnnnnnnnnnnnnnnnnnnnnnnnnnnnnnnnnnnnnnnnnnnnnnnnnnnnnnnnnnnnnnnnnnnnnnnnnnnnnnnnnnnnnnnnnnnnnnnnnnnnnnnnnnnnnnnnnnnnnnnnnnnnnnnnnnnnnnnnnnnnnnnnnnnnnnnnnnnnnnnnnnnnnnnnnnnnnnnnnnnnnnnnnnnnnnnnnnnnnnnnnnnnnnnnnnnnnnnnnnnnnnnnnnnnnnnnnnnnnnnnnnnnnnnnnnnnnnnnnnnnnnnnnnnnnnnnnnnnnnnnnnnnnnnnnnnnnnnnnnnnnnnnnnnnnnnnnnnnnnnnnnnnnnnnnnnnnnnnnnnnnnnnnnnnnnnnnnnnnnnnnnnnnnnnnnnnnnnnnnnnnnnnnnnnnnnnnnnnnnnnnnnnnnnnnnnnnnnnnnnnnnnnnnnnnnnnnnnnnnnnnnnnnnnnnnnnnnnnnnnnnnnnnnnnnnnnnnnnnnnnnnnnnnnnnnnnnnnnnnnnnnnnnnnnnnnnnnnnnnnnnnnnnnnnnnnnnnnnnnnnnnnnnnnnnnnnnnnnnnnnnnnnnnnnnnnnnnnnnnnnnnnnnnnnnnnnnnnnnnnnnnnnnnnnnnnnnnnnnnnnnnnnnnnnnnnnnnnnnnnnnnnnnnnnnnnnnnnnnnnnnnnnnnnnnnnnnnnnnnnnnnnnnnnnnnnnnnnnnnnnnnnnnnnnnnnnnnnnnnnnnnnnnnnnnnnnnnnnnnnnnnnnnnnnnnnnnnnnnnnnnnnnnnnnnnnnnnnnnnnnnnnnnnnnnnnnnnnnnnnnnnnnnnnnnnnnnnnnnnnnnnnnnnnnnnnnnnnnnnnnnnnnnnnnnnnnnnnnnnnnnnnnnnnnnnnnnnnnnnnnnnnnnnnnnnnnnnnnnnnnnnnnnnnnnnnnnnnnnnnnnnnnnnnnnnnnnnnnnnnnnnnnnnnnnnnnnnnnnnnnnnnnnnnnnnnnnnnnnnnnnnnnnnnnnnnnnnnnnnnnnnnnnnnnnnnnnnnnnnnnnnnnnnnnnnnnnnnnnnnnnnnnnnnnnnnnnnnnnnnnnnnnnnnnnnnnnnnnnnnnnnnnnnnnnnnnnnnnnnnnnnnnnnnnnnnnnnnnnnnnnnnnnnnnnnnnnnnnnnnnnnnnnnnnnnnnnnnnnnnnnnnnnnnnnnnnnnnnnnnnnnnnnnnnnnnnnnnnnnnnnnnnnnnnnnnnnnnnnnnnnnnnnnnnnnnnnnnnnnnnnnnnnnnnnnnnnnnnnnnnnnnnnnnnnnnnnnnnnnnnnnnnnnnnnnnnnnnnnnnnnnnnnnnnnnnnnnnnnnnnnnnnnnnnnnnnnnnnnnnnnnnnnnnnnnnnnnnnnnnnnnnnnnnnnnnnnnnnnnnnnnnnnnnnnnnnnnnnnnnnnnnnnnnnnnnnnnnnnnnnnnnnnnnnnnnnnnnnnnnnnnnnnnnnnnnnnnnnnnnnnnnnnnnnnnnnnnnnnnnnnnnnnnnnnnnnnnnnnnnnnnnnnnnnnnnnnnnnnnnnnnnnnnnnnnnnnnnnnnnnnnnnnnnnnnnnnnnnnnnnnnnnnnnnnnnnnnnnnnnnnnnnnnnnnnnnnnnnnnnnnnnnnnnnnnnnnnnnnnnnnnnnnnnnnnnnnnnnnnnnnnnnnnnnnnnnnnnnnnnnnnnnnnnnnnnnnnnnnnnnnnnnnnnnnnnnnnnnnnnnnnnnnnnnnnnnnnnnnnnnnnnnnnnnnnnnnnnnnnnnnnnnnnnnnnnnnnnnnnnnnnnnnnnnnnnnnnnnnnnnnnnnnnnnnnnnnnnnnnnnnnnnnnnnnnnnnnnnnnnnnnnnnnnnnnnnnnnnnnnnnnnnnnnnnnnnnnnnnnnnnnnnnnnnnnnnnnnnnnnnnnnnnnnnnnnnnnnnnnnnnnnnnnnnnnnnnnnnnnnnnnnnnnnnnnnnnnnnnnnnnnnnnnnnnnnnnnnnnnnnnnnnnnnnnnnnnnnnnnnnnnnnnnnnnnnnnnnnnnnnnnnnnnnnnnnnnnnnnnnnnnnnnnnnnnnnnnnnnnnnnnnnnnnnnnnnnnnnnnnnnnnnnnnnnnnnnnnnnnnnnnnnnnnnnnnnnnnnnnnnnnnnnnnnnnnnnnnnnnnnnnnnnnnnnnnnnnnnnnnnnnnnnnnnnnnnnnnnnnnnnnnnnnnnnnnnnnnnnnnnnnnnnnnnnnnnnnnnnnnnnnnnnnnnnnnnnnnnnnnnnnnnnnnnnnnnnnnnnnnnnnnnnnnnnnnnnnnnnnnnnnnnnnnnnnnnnnnnnnnnnnnnnnnnnnnnnnnnnnnnnnnnnnnnnnnnnnnnnnnnnnnnnnnnnnnnnnnnnnnnnnnnnnnnnnnnnnnnnnnnnnnnnnnnnnnnnnnnnnnnnnnnnnnnnnnnnnnnnnnnnnnnnnnnnnnnnnnnnnnnnnnnnnnnnnnnnnnnnnnnnnnnnnnnnnnnnnnnnnnnnnnnnnnnnnnnnnnnnnnnnnnnnnnnnnnnnnnnnnnnnnnnnnnnnnnnnnnnnnnnnnnnnnnnnnnnnnnnnnnnnnnnnnnnnnnnnnnnnnnnnnnnnnnnnnnnnnnnnnnnnnnnnnnnnnnnnnnnnnnnnnnnnnnnnnnnnnnnnnnnnnnnnnnnnnnnnnnnnnnnnnnnnnnnnnnnnnnnnnnnnnnnnnnnnnnnnnnnnnnnnnnnnnnnnnnnnnnnnnnnnnnnnnnnnnnnnnnnnnnnnnnnnnnnnnnnnnnnnnnnnnnnnnnnnnnnnnnnnnnnnnnnnnnnnnnnnnnnnnnnnnnnnnnnnnnnnnnnnnnnnnnnnnnnnnnnnnnnnnnnnnnnnnnnnnnnnnnnnnnnnnnnnnnnnnnnnnnnnnnnnnnnnnnnnnnnnnnnnnnnnnnnnnnnnnnnnnnnnnnnnnnnnnnnnnnnnnnnnnnnnnnnnnnnnnnnnnnnnnnnnnnnnnnnnnnnnnnnnnnnnnnnnnnnnnnnnnnnnnnnnnnnnnnnnnnnnnnnnnnnnnnnnnnnnnnnnnnnnnnnnnnnnnnnnnnnnnnnnnnnnnnnnnnnnnnnnnnnnnnnnnnnnnnnnnnnnnnnnnnnnnnnnnnnnnnnnnnnnnnnnnnnnnnnnnnnnnnnnnnnnnnnnnnnnnnnnnnnnnnnnnnnnnnnnnnnnnnnnnnnnnnnnnnnnnnnnnnnnnnnnnnnnnnnnnnnnnnnnnnnnnnnnnnnnnnnnnnnnnnnnnnnnnnnnnnnnnnnnnnnnnnnnnnnnnnnnnnnnnnnnnnnnnnnnnnnnnnnnnnnnnnnnnnnnnnnnnnnnnnnnnnnnnnnnnnnnnnnnnnnnnnnnnnnnnnnnnnnnnnnnnnnnnnnnnnnnnnnnnnnnnnnnnnnnnnnnnnnnnnnnnnnnnnnnnnnnnnnnnnnnnnnnnnnnnnnnnnnnnnnnnnnnnnnnnnnnnnnnnnnnnnnnnnnnnnnnnnnnnnnnnnnnnnnnnnnnnnnnnnnnnnnnnnnnnnnnnnnnnnnnnnnnnnnnnnnnnnnnnnnnnnnnnnnnnnnnnnnnnnnnnnnnnnnnnnnnnnnnnnnnnnnnnnnnnnnnnnnnnnnnnnnnnnnnnnnnnnnnnnnnnnnnnnnnnnnnnnnnnnnnnnnnnnnnnnnnnnnnnnnnnnnnnnnnnnnnnnnnnnnnnnnnnnnnnnnnnnnnnnnnnnnnnnnnnnnnnnnnnnnnnnnnnnnnnnnnnnnnnnnnnnnnnnnnnnnnnnnnnnnnnnnnnnnnnnnnnnnnnnnnnnnnnnnnnnnnnnnnnnnnnnnnnnnnnnnnnnnnnnnnnnnnnnnnnnnnnnnnnnnnnnnnnnnnnnnnnnnnnnnnnnnnnnnnnnnnnnnnnnnnnnnnnnnnnnnnnnnnnnnnnnnnnnnnnnnnnnnnnnnnnnnnnnnnnnnnnnnnnnnnnnnnnnnnnnnnnnnnnnnnnnnnnnnnnnnnnnnnnnnnnnnnnnnnnnnnnnnnnnnnnnnnnnnnnnnnnnnnnnnnnnnnnnnnnnnnnnnnnnnnnnnnnnnnnnnnnnnnnnnnnnnnnnnnnnnnnnnnnnnnnnnnnnnnnnnnnnnnnnnnnnnnnnnnnnnnnnnnnnnnnnnnnnnnnnnnnnnnnnnnnnnnnnnnnnnnnnnnnnnnnnnnnnnnnnnnnnnnnnnnnnnnnnnnnnnnnnnnnnnnnnnnnnnnnnnnnnnnnnnnnnnnnnnnnnnnnnnnnnnnnnnnnnnnnnnnnnnnnnnnnnnnnnnnnnnnnnnnnnnnnnnnnnnnnnnnnnnnnnnnnnnnnnnnnnnnnnnnnnnnnnnnnnnnnnnnnnnnnnnnnnnnnnnnnnnnnnnnnnnnnnnnnnnnnnnnnnnnnnnnnnnnnnnnnnnnnnnnnnnnnnnnnnnnnnnnnnnnnnnnnnnnnnnnnnnnnnnnnnnnnnnnnnnnnnnnnnnnnnnnnnnnnnnnnnnnnnnnnnnnnnnnnnnnnnnnnnnnnnnnnnnnnnnnnnnnnnnnnnnnnnnnnnnnnnnnnnnnnnnnnnnnnnnnnnnnnnnnnnnnnnnnnnnnnnnnnnnnnnnnnnnnnnnnnnnnnnnnnnnnnnnnnnnnnnnnnnnnnnnnnnnnnnnnnnnnnnnnnnnnnnnnnnnnnnnnnnnnnnnnnnnnnnnnnnnnnnnnnnnnnnnnnnnnnnnnnnnnnnnnnnnnnnnnnnnnnnnnnnnnnnnnnnnnnnnnnnnnnnnnnnnnnnnnnnnnnnnnnnnnnnnnnnnnnnnnnnnnnnnnnnnnnnnnnnnnnnnnnnnnnnnnnnnnnnnnnnnnnnnnnnnnnnnnnnnnnnnnnnnnnnnnnnnnnnnnnnnnnnnnnnnnnnnnnnnnnnnnnnnnnnnnnnnnnnnnnnnnnnnnnnnnnnnnnnnnnnnnnnnnnnnnnnnnnnnnnnnnnnnnnnnnnnnnnnnnnnnnnnnnnnnnnnnnnnnnnnnnnnnnnnnnnnnnnnnnnnnnnnnnnnnnnnnnnnnnnnnnnnnnnnnnnnnnnnnnnnnnnnnnnnnnnnnnnnnnnnnnnnnnnnnnnnnnnnnnnnnnnnnnnnnnnnnnnnnnnnnnnnnnnnnnnnnnnnnnnnnnnnnnnnnnnnnnnnnnnnnnnnnnnnnnnnnnnnnnnnnnnnnnnnnnnnnnnnnnnnnnnnnnnnnnnnnnnnnnnnnnnnnnnnnnnnnnnnnnnnnnnnnnnnnnnnnnnnnnnnnnnnnnnnnnnnnnnnnnnnnnnnnnnnnnnnnnnnnnnnnnnnnnnnnnnnnnnnnnnnnnnnnnnnnnnnnnnnnnnnnnnnnnnnnnnnnnnnnnnnnnnnnnnnnnnnnnnnnnnnnnnnnnnnnnnnnnnnnnnnnnnnnnnnnnnnnnnnnnnnnnnnnnnnnnnnnnnnnnnnnnnnnnnnnnnnnnnnnnnnnnnnnnnnnnnnnnnnnnnnnnnnnnnnnnnnnnnnnnnnnnnnnnnnnnnnnnnnnnnnnnnnnnnnnnnnnnnnnnnnnnnnnnnnnnnnnnnnnnnnnnnnnnnnnnnnnnnnnnnnnnnnnnnnnnnnnnnnnnnnnnnnnnnnnnnnnnnnnnnnnnnnnnnnnnnnnnnnnnnnnnnnnnnnnnnnnnnnnnnnnnnnnnnnnnnnnnnnnnnnnnnnnnnnnnnnnnnnnnnnnnnnnnnnnnnnnnnnnnnnnnnnnnnnnnnnnnnnnnnnnnnnnnnnnnnnnnnnnnnnnnnnnnnnnnnnnnnnnnnnnnnnnnnnnnnnnnnnnnnnnnnnnnnnnnnnnnnnnnnnnnnnnnnnnnnnnnnnnnnnnnnnnnnnnnnnnnnnnnnnnnnnnnnnnnnnnnnnnnnnnnnnnnnnnnnnnnnnnnnnnnnnnnnnnnnnnnnnnnnnnnnnnnnnnnnnnnnnnnnnnnnnnnnnnnnnnnnnnnnnnnnnnnnnnnnnnnnnnnnnnnnnnnnnnnnnnnnnnnnnnnnnnnnnnnnnnnnnnnnnnnnnnnnnnnnnnnnnnnnnnnnnnnnnnnnnnnnnnnnnnnnnnnnnnnnnnnnnnnnnnnnnnnnnnnnnnnnnnnnnnnnnnnnnnnnnnnnnnnnnnnnnnnnnnnnnnnnnnnnnnnnnnnnnnnnnnnnnnnnnnnnnnnnnnnnnnnnnnnnnnnnnnnnnnnnnnnnnnnnnnnnnnnnnnnnnnnnnnnnnnnnnnnnnnnnnnnnnnnnnnnnnnnnnnnnnnnnnnnnnnnnnnnnnnnnnnnnnnnnnnnnnnnnnnnnnnnnnnnnnnnnnnnnnnnnnnnnnnnnnnnnnnnnnnnnnnnnnnnnnnnnnnnnnnnnnnnnnnnnnnnnnnnnnnnnnnnnnnnnnnnnnnnnnnnnnnnnnnnnnnnnnnnnnnnnnnnnnnnnnnnnnnnnnnnnnnnnnnnnnnnnnnnnnnnnnnnnnnnnnnnnnnnnnnnnnnnnnnnnnnnnnnnnnnnnnnnnnnnnnnnnnnnnnnnnnnnnnnnnnnnnnnnnnnnnnnnnnnnnnnnnnnnnnnnnnnnnnnnnnnnnnnnnnnnnnnnnnnnnnnnnnnnnnnnnnnnnnnnnnnnnnnnnnnnnnnnnnnnnnnnnnnnnnnnnnnnnnnnnnnnnnnnnnnnnnnnnnnnnnnnnnnnnnnnnnnnnnnnnnnnnnnnnnnnnnnnnnnnnnnnnnnnnnnnnnnnnnnnnnnnnnnnnnnnnnnnnnnnnnnnnnnnnnnnnnnnnnnnnnnnnnnnnnnnnnnnnnnnnnnnnnnnnnnnnnnnnnnnnnnnnnnnnnnnnnnnnnnnnnnnnnnnnnnnnnnnnnnnnnnnnnnnnnnnnnnnnnnnnnnnnnnnnnnnnnnnnnnnnnnnnnnnnnnnnnnnnnnnnnnnnnnnnnnnnnnnnnnnnnnnnnnnnnnnnnnnnnnnnnnnnnnnnnnnnnnnnnnnnnnnnnnnnnnnnnnnnnnnnnnnnnnnnnnnnnnnnnnnnnnnnnnnnnnnnnnnnnnnnnnnnnnnnnnnnnnnnnnnnnnnnnnnnnnnnnnnnnnnnnnnnnnnnnnnnnnnnnnnnnnnnnnnnnnnnnnnnnnnnnnnnnnnnnnnnnnnnnnnnnnnnnnnnnnnnnnnnnnnnnnnnnnnnnnnnnnnnnnnnnnnnnnnnnnnnnnnnnnnnnnnnnnnnnnnnnnnnnnnnnnnnnnnnnnnnnnnnnnnnnnnnnnnnnnnnnnnnnnnnnnnnnnnnnnnnnnnnnnnnnnnnnnnnnnnnnnnnnnnnnnnnnnnnnnnnnnnnnnnnnnnnnnnnnnnnnnnnnnnnnnnnnnnnnnnnnnnnnnnnnnnnnnnnnnnnnnnnnnnnnnnnnnnnnnnnnnnnnnnnnnnnnnnnnnnnnnnnnnnnnnnnnnnnnnnnnnnnnnnnnnnnnnnnnnnnnnnnnnnnnnnnnnnnnnnnnnnnnnnnnnnnnnnnnnnnnnnnnnnnnnnnnnnnnnnnnnnnnnnnnnnnnnnnnnnnnnnnnnnnnnnnnnnnnnnnnnnnnnnnnnnnnnnnnnnnnnnnnnnnnnnnnnnnnnnnnnnnnnnnnnnnnnnnnnnnnnnnnnnnnnnnnnnnnnnnnnnnnnnnnnnnnnnnnnnnnnnnnnnnnnnnnnnnnnnnnnnnnnnnnnnnnnnnnnnnnnnnnnnnnnnnnnnnnnnnnnnnnnnnnnnnnnnnnnnnnnnnnnnnnnnnnnnnnnnnnnnnnnnnnnnnnnnnnnnnnnnnnnnnnnnnnnnnnnnnnnnnnnnnnnnnnnnnnnnnnnnnnnnnnnnnnnnnnnnnnnnnnnnnnnnnnnnnnnnnnnnnnnnnnnnnnnnnnnnnnnnnnnnnnnnnnnnnnnnnnnnnnnnnnnnnnnnnnnnnnnnnnnnnnnnnnnnnnnnnnnnnnnnnnnnnnnnnnnnnnnnnnnnnnnnnnnnnnnnnnnnnnnnnnnnnnnnnnnnnnnnnnnnnnnnnnnnnnnnnnnnnnnnnnnnnnnnnnnnnnnnnnnnnnnnnnnnnnnnnnnnnnnnnnnnnnnnnnnnnnnnnnnnnnnnnnnnnnnnnnnnnnnnnnnnnnnnnnnnnnnnnnnnnnnnnnnnnnnnnnnnnnnnnnnnnnnnnnnnnnnnnnnnnnnnnnnnnnnnnnnnnnnnnnnnnnnnnnnnnnnnnnnnnnnnnnnnnnnnnnnnnnnnnnnnnnnnnnnnnnnnnnnnnnnnnnnnnnnnnnnnnnnnnnnnnnnnnnnnnnnnnnnnnnnnnnnnnnnnnnnnnnnnnnnnnnnnnnnnnnnnnnnnnnnnnnnnnnnnnnnnnnnnnnnnnnnnnnnnnnnnnnnnnnnnnnnnnnnnnnnnnnnnnnnnnnnnnnnnnnnnnnnnnnnnnnnnnnnnnnnnnnnnnnnnnnnnnnnnnnnnnnnnnnnnnnnnnnnnnnnnnnnnnnnnnnnnnnnnnnnnnnnnnnnnnnnnnnnnnnnnnnnnnnnnnnnnnnnnnnnnnnnnnnnnnnnnnnnnnnnnnnnnnnnnnnnnnnnnnnnnnnnnnnnnnnnnnnnnnnnnnnnnnnnnnnnnnnnnnnnnnnnnnnnnnnnnnnnnnnnnnnnnnnnnnnnnnnnnnnnnnnnnnnnnnnnnnnnnnnnnnnnnnnnnnnnnnnnnnnnnnnnnnnnnnnnnnnnnnnnnnnnnnnnnnnnnnnnnnnnnnnnnnnnnnnnnnnnnnnnnnnnnnnnnnnnnnnnnnnnnnnnnnnnnnnnnnnnnnnnnnnnnnnnnnnnnnnnnnnnnnnnnnnnnnnnnnnnnnnnnnnnnnnnnnnnnnnnnnnnnnnnnnnnnnnnnnnnnnnnnnnnnnnnnnnnnnnnnnnnnnnnnnnnnnnnnnnnnnnnnnnnnnnnnnnnnnnnnnnnnnnnnnnnnnnnnnnnnnnnnnnnnnnnnnnnnnnnnnnnnnnnnnnnnnnnnnnnnnnnnnnnnnnnnnnnnnnnnnnnnnnnnnnnnnnnnnnnnnnnnnnnnnnnnnnnnnnnnnnnnnnnnnnnnnnnnnnnnnnnnnnnnnnnnnnnnnnnnnnnnnnnnnnnnnnnnnnnnnnnnnnnnnnnnnnnnnnnnnnnnnnnnnnnnnnnnnnnnnnnnnnnnnnnnnnnnnnnnnnnnnnnnnnnnnnnnnnnnnnnnnnnnnnnnnnnnnnnnnnnnnnnnnnnnnnnnnnnnnnnnnnnnnnnnnnnnnnnnnnnnnnnnnnnnnnnnnnnnnnnnnnnnnnnnnnnnnnnnnnnnnnnnnnnnnnnnnnnnnnnnnnnnnnnnnnnnnnnnnnnnnnnnnnnnnnnnnnnnnnnnnnnnnnnnnnnnnnnnnnnnnnnnnnnnnnnnnnnnnnnnnnnnnnnnnnnnnnnnnnnnnnnnnnnnnnnnnnnnnnnnnnnnnnnnnnnnnnnnnnnnnnnnnnnnnnnnnnnnnnnnnnnnnnnnnnnnnnnnnnnnnnnnnnnnnnnnnnnnnnnnnnnnnnnnnnnnnnnnnnnnnnnnnnnnnnnnnnnnnnnnnnnnnnnnnnnnnnnnnnnnnnnnnnnnnnnnnnnnnnnnnnnnnnnnnnnnnnnnnnnnnnnnnnnnnnnnnnnnnnnnnnnnnnnnnnnnnnnnnnnnnnnnnnnnnnnnnnnnnnnnnnnnnnnnnnnnnnnnnnnnnnnnnnnnnnnnnnnnnnnnnnnnnnnnnnnnnnnnnnnnnnnnnnnnnnnnnnnnnnnnnnnnnnnnnnnnnnnnnnnnnnnnnnnnnnnnnnnnnnnnnnnnnnnnnnnnnnnnnnnnnnnnnnnnnnnnnnnnnnnnnnnnnnnnnnnnnnnnnnnnnnnnnnnnnnnnnnnnnnnnnnnnnnnnnnnnnnnnnnnnnnnnnnnnnnnnnnnnnnnnnnnnnnnnnnnnnnnnnnnnnnnnnnnnnnnnnnnnnnnnnnnnnnnnnnnnnnnnnnnnnnnnnnnnnnnnnnnnnnnnnnnnnnnnnnnnnnnnnnnnnnnnnnnnnnnnnnnnnnnnnnnnnnnnnnnnnnnnnnnnnnnnnnnnnnnnnnnnnnnnnnnnnnnnnnnnnnnnnnnnnnnnnnnnnnnnnnnnnnnnnnnnnnnnnnnnnnnnnnnnnnnnnnnnnnnnnnnnnnnnnnnnnnnnnnnnnnnnnnnnnnnnnnnnnnnnnnnnnnnnnnnnnnnnnnnnnnnnnnnnnnnnnnnnnnnnnnnnnnnnnnnnnnnnnnnnnnnnnnnnnnnnnnnnnnnnnnnnnnnnnnnnnnnnnnnnnnnnnnnnnnnnnnnnnnnnnnnnnnnnnnnnnnnnnnnnnnnnnnnnnnnnnnnnnnnnnnnnnnnnnnnnnnnnnnnnnnnnnnnnnnnnnnnnnnnnnnnnnnnnnnnnnnnnnnnnnnnnnnnnnnnnnnnnnnnnnnnnnnnnnnnnnnnnnnnnnnnnnnnnnnnnnnnnnnnnnnnnnnnnnnnnnnnnnnnnnnnnnnnnnnnnnnnnnnnnnnnnnnnnnnnnnnnnnnnnnnnnnnnnnnnnnnnnnnnnnnnnnnnnnnnnnnnnnnnnnnnnnnnnnnnnnnnnnnnnnnnnnnnnnnnnnnnnnnnnnnnnnnnnnnnnnnnnnnnnnnnnnnnnnnnnnnnnnnnnnnnnnnnnnnnnnnnnnnnnnnnnnnnnnnnnnnnnnnnnnnnnnnnnnnnnnnnnnnnnnnnnnnnnnnnnnnnnnnnnnnnnnnnnnnnnnnnnnnnnnnnnnnnnnnnnnnnnnnnnnnnnnnnnnnnnnnnnnnnnnnnnnnnnnnnnnnnnnnnnnnnnnnnnnnnnnnnnnnnnnnnnnnnnnnnnnnnnnnnnnnnnnnnnnnnnnnnnnnnnnnnnnnnnnnnnnnnnnnnnnnnnnnnnnnnnnnnnnnnnnnnnnnnnnnnnnnnnnnnnnnnnnnnnnnnnnnnnnnnnnnnnnnnnnnnnnnnnnnnnnnnnnnnnnnnnnnnnnnnnnnnnnnnnnnnnnnnnnnnnnnnnnnnnnnnnnnnnnnnnnnnnnnnnnnnnnnnnnnnnnnnnnnnnnnnnnnnnnnnnnnnnnnnnnnnnnnnnnnnnnnnnnnnnnnnnnnnnnnnnnnnnnnnnnnnnnnnnnnnnnnnnnnnnnnnnnnnnnnnnnnnnnnnnnnnnnnnnnnnnnnnnnnnnnnnnnnnnnnnnnnnnnnnnnnnnnnnnnnnnnnnnnnnnnnnnnnnnnnnnnnnnnnnnnnnnnnnnnnnnnnnnnnnnnnnnnnnnnnnnnnnnnnnnnnnnnnnnnnnnnnnnnnnnnnnnnnnnnnnnnnnnnnnnnnnnnnnnnnnnnnnnnnnnnnnnnnnnnnnnnnnnnnnnnnnnnnnnnnnnnnnnnnnnnnnnnnnnnnnnnnnnnnnnnnnnnnnnnnnnnnnnnnnnnnnnnnnnnnnnnnnnnnnnnnnnnnnnnnnnnnnnnnnnnnnnnnnnnnnnnnnnnnnnnnnnnnnnnnnnnnnnnnnnnnnnnnnnnnnnnnnnnnnnnnnnnnnnnnnnnnnnnnnnnnnnnnnnnnnnnnnnnnnnnnnnnnnnnnnnnnnnnnnnnnnnnnnnnnnnnnnnnnnnnnnnnnnnnnnnnnnnnnnnnnnnnnnnnnnnnnnnnnnnnnnnnnnnnnnnnnnnnnnnnnnnnnnnnnnnnnnnnnnnnnnnnnnnnnnnnnnnnnnnnnnnnnnnnnnnnnnnnnnnnnnnnnnnnnnnnnnnnnnnnnnnnnnnnnnnnnnnnnnnnnnnnnnnnnnnnnnnnnnnnnnnnnnnnnnnnnnnnnnnnnnnnnnnnnnnnnnnnnnnnnnnnnnnnnnnnnnnnnnnnnnnnnnnnnnnnnnnnnnnnnnnnnnnnnnnnnnnnnnnnnnnnnnnnnnnnnnnnnnnnnnnnnnnnnnnnnnnnnnnnnnnnnnnnnnnnnnnnnnnnnnnnnnnnnnnnnnnnnnnnnnnnnnnnnnnnnnnnnnnnnnnnnnnnnnnnnnnnnnnnnnnnnnnnnnnnnnnnnnnnnnnnnnnnnnnnnnnnnnnnnnnnnnnnnnnnnnnnnnnnnnnnnnnnnnnnnnnnnnnnnnnnnnnnnnnnnnnnnnnnnnnnnnnnnnnnnnnnnnnnnnnnnnnnnnnnnnnnnnnnnnnnnnnnnnnnnnnnnnnnnnnnnnnnnnnnnnnnnnnnnnnnnnnnnnnnnnnnnnnnnnnnnnnnnnnnnnnnnnnnnnnnnnnnnnnnnnnnnnnnnnnnnnnnnnnnnnnnnnnnnnnnnnnnnnnnnnnnnnnnnnnnnnnnnnnnnnnnnnnnnnnnnnnnnnnnnnnnnnnnnnnnnnnnnnnnnnnnnnnnnnnnnnnnnnnnnnnnnnnnnnnnnnnnnnnnnnnnnnnnnnnnnnnnnnnnnnnnnnnnnnnnnnnnnnnnnnnnnnnnnnnnnnnnnnnnnnnnnnnnnnnnnnnnnnnnnnnnnnnnnnnnnnnnnnnnnnnnnnnnnnnnnnnnnnnnnnnnnnnnnnnnnnnnnnnnnnnnnnnnnnnnnnnnnnnnnnnnnnnnnnnnnnnnnnnnnnnnnnnnnnnnnnnnnnnnnnnnnnnnnnnnnnnnnnnnnnnnnnnnnnnnnnnnnnnnnnnnnnnnnnnnnnnnnnnnnnnnnnnnnnnnnnnnnnnnnnnnnnnnnnnnnnnnnnnnnnnnnnnnnnnnnnnnnnnnnnnnnnnnnnnnnnnnnnnnnnnnnnnnnnnnnnnnnnnnnnnnnnnnnnnnnnnnnnnnnnnnnnnnnnnnnnnnnnnnnnnnnnnnnnnnnnnnnnnnnnnnnnnnnnnnnnnnnnnnnnnnnnnnnnnnnnnnnnnnnnnnnnnnnnnnnnnnnnnnnnnnnnnnnnnnnnnnnnnnnnnnnnnnnnnnnnnnnnnnnnnnnnnnnnnnnnnnnnnnnnnnnnnnnnnnnnnnnnnnnnnnnnnnnnnnnnnnnnnnnnnnnnnnnnnnnnnnnnnnnnnnnnnnnnnnnnnnnnnnnnnnnnnnnnnnnnnnnnnnnnnnnnnnnnnnnnnnnnnnnnnnnnnnnnnnnnnnnnnnnnnnnnnnnnnnnnnnnnnnnnnnnnnnnnnnnnnnnnnnnnnnnnnnnnnnnnnnnnnnnnnnnnnnnnnnnnnnnnnnnnnnnnnnnnnnnnnnnnnnnnnnnnnnnnnnnnnnnnnnnnnnnnnnnnnnnnnnnnnnnnnnnnnnnnnnnnnnnnnnnnnnnnnnnnnnnnnnnnnnnnnnnnnnnnnnnnnnnnnnnnnnnnnnnnnnnnnnnnnnnnnnnnnnnnnnnnnnnnnnnnnnnnnnnnnnnnnnnnnnnnnnnnnnnnnnnnnnnnnnnnnnnnnnnnnnnnnnnnnnnnnnnnnnnnnnnnnnnnnnnnnnnnnnnnnnnnnnnnnnnnnnnnnnnnnnnnnnnnnnnnnnnnnnnnnnnnnnnnnnnnnnnnnnnnnnnnnnnnnnnnnnnnnnnnnnnnnnnnnnnnnnnnnnnnnnnnnnnnnnnnnnnnnnnnnnnnnnnnnnnnnnnnnnnnnnnnnnnnnnnnnnnnnnnnnnnnnnnnnnnnnnnnnnnnnnnnnnnnnnnnnnnnnnnnnnnnnnnnnnnnnnnnnnnnnnnnnnnnnnnnnnnnnnnnnnnnnnnnnnnnnnnnnnnnnnnnnnnnnnnnnnnnnnnnnnnnnnnnnnnnnnnnnnnnnnnnnnnnnnnnnnnnnnnnnnnnnnnnnnnnnnnnnnnnnnnnnnnnnnnnnnnnnnnnnnnnnnnnnnnnnnnnnnnnnnnnnnnnnnnnnnnnnnnnnnnnnnnnnnnnnnnnnnnnnnnnnnnnnnnnnnnnnnnnnnnnnnnnnnnnnnnnnnnnnnnnnnnnnnnnnnnnnnnnnnnnnnnnnnnnnnnnnnnnnnnnnnnnnnnnnnnnnnnnnnnnnnnnnnnnnnnnnnnnnnnnnnnnnnnnnnnnnnnnnnnnnnnnnnnnnnnnnnnnnnnnnnnnnnnnnnnnnnnnnnnnnnnnnnnnnnnnnnnnnnnnnnnnnnnnnnnnnnnnnnnnnnnnnnnnnnnnnnnnnnnnnnnnnnnnnnnnnnnnnnnnnnnnnnnnnnnnnnnnnnnnnnnnnnnnnnnnnnnnnnnnnnnnnnnnnnnnnnnnnnnnnnnnnnnnnnnnnnnnnnnnnnnnnnnnnnnnnnnnnnnnnnnnnnnnnnnnnnnnnnnnnnnnnnnnnnnnnnnnnnnnnnnnnnnnnnnnnnnnnnnnnnnnnnnnnnnnnnnnnnnnnnnnnnnnnnnnnnnnnnnnnnnnnnnnnnnnnnnnnnnnnnnnnnnnnnnnnnnnnnnnnnnnnnnnnnnnnnnnnnnnnnnnnnnnnnnnnnnnnnnnnnnnnnnnnnnnnnnnnnnnnnnnnnnnnnnnnnnnnnnnnnnnnnnnnnnnnnnnnnnnnnnnnnnnnnnnnnnnnnnnnnnnnnnnnnnnnnnnnnnnnnnnnnnnnnnnnnnnnnnnnnnnnnnnnnnnnnnnnnnnnnnnnnnnnnnnnnnnnnnnnnnnnnnnnnnnnnnnnnnnnnnnnnnnnnnnnnnnnnnnnnnnnnnnnnnnnnnnnnnnnnnnnnnnnnnnnnnnnnnnnnnnnnnnnnnnnnnnnnnnnnnnnnnnnnnnnnnnnnnnnnnnnnnnnnnnnnnnnnnnnnnnnnnnnnnnnnnnnnnnnnnnnnnnnnnnnnnnnnnnnnnnnnnnnnnnnnnnnnnnnnnnnnnnnnnnnnnnnnnnnnnnnnnnnnnnnnnnnnnnnnnnnnnnnnnnnnnnnnnnnnnnnnnnnnnnnnnnnnnnnnnnnnnnnnnnnnnnnnnnnnnnnnnnnnnnnnnnnnnnnnnnnnnnnnnnnnnnnnnnnnnnnnnnnnnnnnnnnnnnnnnnnnnnnnnnnnnnnnnnnnnnnnnnnnnnnnnnnnnnnnnnnnnnnnnnnnnnnnnnnnnnnnnnnnnnnnnnnnnnnnnnnnnnnnnnnnnnnnnnnnnnnnnnnnnnnnnnnnnnnnnnnnnnnnnnnnnnnnnnnnnnnnnnnnnnnnnnnnnnnnnnnnnnnnnnnnnnnnnnnnnnnnnnnnnnnnnnnnnnnnnnnnnnnnnnnnnnnnnnnnnnnnnnnnnnnnnnnnnnnnnnnnnnnnnnnnnnnnnnnnnnnnnnnnnnnnnnnnnnnnnnnnnnnnnnnnnnnnnnnnnnnnnnnnnnnnnnnnnnnnnnnnnnnnnnnnnnnnnnnnnnnnnnnnnnnnnnnnnnnnnnnnnnnnnnnnnnnnnnnnnnnnnnnnnnnnnnnnnnnnnnnnnnnnnnnnnnnnnnnnnnnnnnnnnnnnnnnnnnnnnnnnnnnnnnnnnnnnnnnnnnnnnnnnnnnnnnnnnnnnnnnnnnnnnnnnnnnnnnnnnnnnnnnnnnnnnnnnnnnnnnnnnnnnnnnnnnnnnnnnnnnnnnnnnnnnnnnnnnnnnnnnnnnnnnnnnnnnnnnnnnnnnnnnnnnnnnnnnnnnnnnnnnnnnnnnnnnnnnnnnnnnnnnnnnnnnnnnnnnnnnnnnnnnnnnnnnnnnnnnnnnnnnnnnnnnnnnnnnnnnnnnnnnnnnnnnnnnnnnnnnnnnnnnnnnnnnnnnnnnnnnnnnnnnnnnnnnnnnnnnnnnnnnnnnnnnnnnnnnnnnnnnnnnnnnnnnnnnnnnnnnnnnnnnnnnnnnnnnnnnnnnnnnnnnnnnnnnnnnnnnnnnnnnnnnnnnnnnnnnnnnnnnnnnnnnnnnnnnnnnnnnnnnnnnnnnnnnnnnnnnnnnnnnnnnnnnnnnnnnnnnnnnnnnnnnnnnnnnnnnnnnnnnnnnnnnnnnnnnnnnnnnnnnnnnnnnnnnnnnnnnnnnnnnnnnnnnnnnnnnnnnnnnnnnnnnnnnnnnnnnnnnnnnnnnnnnnnnnnnnnnnnnnnnnnnnnnnnnnnnnnnnnnnnnnnnnnnnnnnnnnnnnnnnnnnnnnnnnnnnnnnnnnnnnnnnnnnnnnnnnnnnnnnnnnnnnnnnnnnnnnnnnnnnnnnnnnnnnnnnnnnnnnnnnnnnnnnnnnnnnnnnnnnnnnnnnnnnnnnnnnnnnnnnnnnnnnnnnnnnnnnnnnnnnnnnnnnnnnnnnnnnnnnnnnnnnnnnnnnnnnnnnnnnnnnnnnnnnnnnnnnnnnnnnnnnnnnnnnnnnnnnnnnnnnnnnnnnnnnnnnnnnnnnnnnnnnnnnnnnnnnnnnnnnnnnnnnnnnnnnnnnnnnnnnnnnnnnnnnnnnnnnnnnnnnnnnnnnnnnnnnnnnnnnnnnnnnnnnnnnnnnnnnnnnnnnnnnnnnnnnnnnnnnnnnnnnnnnnnnnnnnnnnnnnnnnnnnnnnnnnnnnnnnnnnnnnnnnnnnnnnnnnnnnnnnnnnnnnnnnnnnnnnnnnnnnnnnnnnnnnnnnnnnnnnnnnnnnnnnnnnnnnnnnnnnnnnnnnnnnnnnnnnnnnnnnnnnnnnnnnnnnnnnnnnnnnnnnnnnnnnnnnnnnnnnnnnnnnnnnnnnnnnnnnnnnnnnnnnnnnnnnnnnnnnnnnnnnnnnnnnnnnnnnnnnnnnnnnnnnnnnnnnnnnnnnnnnnnnnnnnnnnnnnnnnnnnnnnnnnnnnnnnnnnnnnnnnnnnnnnnnnnnnnnnnnnnnnnnnnnnnnnnnnnnnnnnnnnnnnnnnnnnnnnnnnnnnnnnnnnnnnnnnnnnnnnnnnnnnnnnnnnnnnnnnnnnnnnnnnnnnnnnnnnnnnnnnnnnnnnnnnnnnnnnnnnnnnnnnnnnnnnnnnnnnnnnnnnnnnnnnnnnnnnnnnnnnnnnnnnnnnnnnnnnnnnnnnnnnnnnnnnnnnnnnnnnnnnnnnnnnnnnnnnnnnnnnnnnnnnnnnnnnnnnnnnnnnnnnnnnnnnnnnnnnnnnnnnnnnnnnnnnnnnnnnnnnnnnnnnnnnnnnnnnnnnnnnnnnnnnnnnnnnnnnnnnnnnnnnnnnnnnnnnnnnnnnnnnnnnnnnnnnnnnnnnnnnnnnnnnnnnnnnnnnnnnnnnnnnnnnnnnnnnnnnnnnnnnnnnnnnnnnnnnnnnnnnnnnnnnnnnnnnnnnnnnnnnnnnnnnnnnnnnnnnnnnnnnnnnnnnnnnnnnnnnnnnnnnnnnnnnnnnnnnnnnnnnnnnnnnnnnnnnnnnnnnnnnnnnnnnnnnnnnnnnnnnnnnnnnnnnnnnnnnnnnnnnnnnnnnnnnnnnnnnnnnnnnnnnnnnnnnnnnnnnnnnnnnnnnnnnnnnnnnnnnnnnnnnnnnnnnnnnnnnnnnnnnnnnnnnnnnnnnnnnnnnnnnnnnnnnnnnnnnnnnnnnnnnnnnnnnnnnnnnnnnnnnnnnnnnnnnnnnnnnnnnnnnnnnnnnnnnnnnnnnnnnnnnnnnnnnnnnnnnnnnnnnnnnnnnnnnnnnnnnnnnnnnnnnnnnnnnnnnnnnnnnnnnnnnnnnnnnnnnnnnnnnnnnnnnnnnnnnnnnnnnnnnnnnnnnnnnnnnnnnnnnnnnnnnnnnnnnnnnnnnnnnnnnnnnnnnnnnnnnnnnnnnnnnnnnnnnnnnnnnnnnnnnnnnnnnnnnnnnnnnnnnnnnnnnnnnnnnnnnnnnnnnnnnnnnnnnnnnnnnnnnnnnnnnnnnnnnnnnnnnnnnnnnnnnnnnnnnnnnnnnnnnnnnnnnnnnnnnnnnnnnnnnnnnnnnnnnnnnnnnnnnnnnnnnnnnnnnnnnnnnnnnnnnnnnnnnnnnnnnnnnnnnnnnnnnnnnnnnnnnnnnnnnnnnnnnnnnnnnnnnnnnnnnnnnnnnnnnnnnnnnnnnnnnnnnnnnnnnnnnnnnnnnnnnnnnnnnnnnnnnnnnnnnnnnnnnnnnnnnnnnnnnnnnnnnnnnnnnnnnnnnnnnnnnnnnnnnnnnnnnnnnnnnnnnnnnnnnnnnnnnnnnnnnnnnnnnnnnnnnnnnnnnnnnnnnnnnnnnnnnnnnnnnnnnnnnnnnnnnnnnnnnnnnnnnnnnnnnnnnnnnnnnnnnnnnnnnnnnnnnnnnnnnnnnnnnnnnnnnnnnnnnnnnnnnnnnnnnnnnnnnnnnnnnnnnnnnnnnnnnnnnnnnnnnnnnnnnnnnnnnnnnnnnnnnnnnnnnnnnnnnnnnnnnnnnnnnnnnnnnnnnnnnnnnnnnnnnnnnnnnnnnnnnnnnnnnnnnnnnnnnnnnnnnnnnnnnnnnnnnnnnnnnnnnnnnnnnnnnnnnnnnnnnnnnnnnnnnnnnnnnnnnnnnnnnnnnnnnnnnnnnnnnnnnnnnnnnnnnnnnnnnnnnnnnnnnnnnnnnnnnnnnnnnnnnnnnnnnnnnnnnnnnnnnnnnnnnnnnnnnnnnnnnnnnnnnnnnnnnnnnnnnnnnnnnnnnnnnnnnnnnnnnnnnnnnnnnnnnnnnnnnnnnnnnnnnnnnnnnnnnnnnnnnnnnnnnnnnnnnnnnnnnnnnnnnnnnnnnnnnnnnnnnnnnnnnnnnnnnnnnnnnnnnnnnnnnnnnnnnnnnnnnnnnnnnnnnnnnnnnnnnnnnnnnnnnnnnnnnnnnnnnnnnnnnnnnnnnnnnnnnnnnnnnnnnnnnnnnnnnnnnnnnnnnnnnnnnnnnnnnnnnnnnnnnnnnnnnnnnnnnnnnnnnnnnnnnnnnnnnnnnnnnnnnnnnnnnnnnnnnnnnnnnnnnnnnnnnnnnnnnnnnnnnnnnnnnnnnnnnnnnnnnnnnnnnnnnnnnnnnnnnnnnnnnnnnnnnnnnnnnnnnnnnnnnnnnnnnnnnnnnnnnnnnnnnnnnnnnnnnnnnnnnnnnnnnnnnnnnnnnnnnnnnnnnnnnnnnnnnnnnnnnnnnnnnnnnnnnnnnnnnnnnnnnnnnnnnnnnnnnnnnnnnnnnnnnnnnnnnnnnnnnnnnnnnnnnnnnnnnnnnnnnnnnnnnnnnnnnnnnnnnnnnnnnnnnnnnnnnnnnnnnnnnnnnnnnnnnnnnnnnnnnnnnnnnnnnnnnnnnnnnnnnnnnnnnnnnnnnnnnnnnnnnnnnnnnnnnnnnnnnnnnnnnnnnnnnnnnnnnnnnnnnnnnnnnnnnnnnnnnnnnnnnnnnnnnnnnnnnnnnnnnnnnnnnnnnnnnnnnnnnnnnnnnnnnnnnnnnnnnnnnnnnnnnnnnnnnnnnnnnnnnnnnnnnnnnnnnnnnnnnnnnnnnnnnnnnnnnnnnnnnnnnnnnnnnnnnnnnnnnnnnnnnnnnnnnnnnnnnnnnnnnnnnnnnnnnnnnnnnnnnnnnnnnnnnnnnnnnnnnnnnnnnnnnnnnnnnnnnnnnnnnnnnnnnnnnnnnnnnnnnnnnnnnnnnnnnnnnnnnnnnnnnnnnnnnnnnnnnnnnnnnnnnnnnnnnnnnnnnnnnnnnnnnnnnnnnnnnnnnnnnnnnnnnnnnnnnnnnnnnnnnnnnnnnnnnnnnnnnnnnnnnnnnnnnnnnnnnnnnnnnnnnnnnnnnnnnnnnnnnnnnnnnnnnnnnnnnnnnnnnnnnnnnnnnnnnnnnnnnnnnnnnnnnnnnnnnnnnnnnnnnnnnnnnnnnnnnnnnnnnnnnnnnnnnnnnnnnnnnnnnnnnnnnnnnnnnnnnnnnnnnnnnnnnnnnnnnnnnnnnnnnnnnnnnnnnnnnnnnnnnnnnnnnnnnnnnnnnnnnnnnnnnnnnnnnnnnnnnnnnnnnnnnnnnnnnnnnnnnnnnnnnnnnnnnnnnnnnnnnnnnnnnnnnnnnnnnnnnnnnnnnnnnnnnnnnnnnnnnnnnnnnnnnnnnnnnnnnnnnnnnnnnnnnnnnnnnnnnnnnnnnnnnnnnnnnnnnnnnnnnnnnnnnnnnnnnnnnnnnnnnnnnnnnnnnnnnnnnnnnnnnnnnnnnnnnnnnnnnnnnnnnnnnnnnnnnnnnnnnnnnnnnnnnnnnnnnnnnnnnnnnnnnnnnnnnnnnnnnnnnnnnnnnnnnnnnnnnnnnnnnnnnnnnnnnnnnnnnnnnnnnnnnnnnnnnnnnnnnnnnnnnnnnnnnnnnnnnnnnnnnnnnnnnnnnnnnnnnnnnnnnnnnnnnnnnnnnnnnnnnnnnnnnnnnnnnnnnnnnnnnnnnnnnnnnnnnnnnnnnnnnnnnnnnnnnnnnnnnnnnnnnnnnnnnnnnnnnnnnnnnnnnnnnnnnnnnnnnnnnnnnnnnnnnnnnnnnnnnnnnnnnnnnnnnnnnnnnnnnnnnnnnnnnnnnnnnnnnnnnnnnnnnnnnnnnnnnnnnnnnnnnnnnnnnnnnnnnnnnnnnnnnnnnnnnnnnnnnnnnnnnnnnnnnnnnnnnnnnnnnnnnnnnnnnnnnnnnnnnnnnnnnnnnnnnnnnnnnnnnnnnnnnnnnnnnnnnnnnnnnnnnnnnnnnnnnnnnnnnnnnnnnnnnnnnnnnnnnnnnnnnnnnnnnnnnnnnnnnnnnnnnnnnnnnnnnnnnnnnnnnnnnnnnnnnnnnnnnnnnnnnnnnnnnnnnnnnnnnnnnnnnnnnnnnnnnnnnnnnnnnnnnnnnnnnnnnnnnnnnnnnnnnnnnnnnnnnnnnnnnnnnnnnnnnnnnnnnnnnnnnnnnnnnnnnnnnnnnnnnnnnnnnnnnnnnnnnnnnnnnnnnnnnnnnnnnnnnnnnnnnnnnnnnnnnnnnnnnnnnnnnnnnnnnnnnnnnnnnnnnnnnnnnnnnnnnnnnnnnnnnnnnnnnnnnnnnnnnnnnnnnnnnnnnnnnnnnnnnnnnnnnnnnnnnnnnnnnnnnnnnnnnnnnnnnnnnnnnnnnnnnnnnnnnnnnnnnnnnnnnnnnnnnnnnnnnnnnnnnnnnnnnnnnnnnnnnnnnnnnnnnnnnnnnnnnnnnnnnnnnnnnnnnnnnnnnnnnnnnnnnnnnnnnnnnnnnnnnnnnnnnnnnnnnnnnnnnnnnnnnnnnnnnnnnnnnnnnnnnnnnnnnnnnnnnnnnnnnnnnnnnnnnnnnnnnnnnnnnnnnnnnnnnnnnnnnnnnnnnnnnnnnnnnnnnnnnnnnnnnnnnnnnnnnnnnnnnnnnnnnnnnnnnnnnnnnnnnnnnnnnnnnnnnnnnnnnnnnnnnnnnnnnnnnnnnnnnnnnnnnnnnnnnnnnnnnnnnnnnnnnnnnnnnnnnnnnnnnnnnnnnnnnnnnnnnnnnnnnnnnnnnnnnnnnnnnnnnnnnnnnnnnnnnnnnnnnnnnnnnnnnnnnnnnnnnnnnnnnnnnnnnnnnnnnnnnnnnnnnnnnnnnnnnnnnnnnnnnnnnnnnnnnnnnnnnnnnnnnnnnnnnnnnnnnnnnnnnnnnnnnnnnnnnnnnnnnnnnnnnnnnnnnnnnnnnnnnnnnnnnnnnnnnnnnnnnnnnnnnnnnnnnnnnnnnnnnnnnnnnnnnnnnnnnnnnnnnnnnnnnnnnnnnnnnnnnnnnnnnnnnnnnnnnnnnnnnnnnnnnnnnnnnnnnnnnnnnnnnnnnnnnnnnnnnnnnnnnnnnnnnnnnnnnnnnnnnnnnnnnnnnnnnnnnnnnnnnnnnnnnnnnnnnnnnnnnnnnnnnnnnnnnnnnnnnnnnnnnnnnnnnnnnnnnnnnnnnnnnnnnnnnnnnnnnnnnnnnnnnnnnnnnnnnnnnnnnnnnnnnnnnnnnnnnnnnnnnnnnnnnnnnnnnnnnnnnnnnnnnnnnnnnnnnnnnnnnnnnnnnnnnnnnnnnnnnnnnnnnnnnnnnnnnnnnnnnnnnnnnnnnnnnnnnnnnnnnnnnnnnnnnnnnnnnnnnnnnnnnnnnnnnnnnnnnnnnnnnnnnnnnnnnnnnnnnnnnnnnnnnnnnnnnnnnnnnnnnnnnnnnnnnnnnnnnnnnnnnnnnnnnnnnnnnnnnnnnnnnnnnnnnnnnnnnnnnnnnnnnnnnnnnnnnnnnnnnnnnnnnnnnnnnnnnnnnnnnnnnnnnnnnnnnnnnnnnnnnnnnnnnnnnnnnnnnnnnnnnnnnnnnnnnnnnnnnnnnnnnnnnnnnnnnnnnnnnnnnnnnnnnnnnnnnnnnnnnnnnnnnnnnnnnnnnnnnnnnnnnnnnnnnnnnnnnnnnnnnnnnnnnnnnnnnnnnnnnnnnnnnnnnnnnnnnnnnnnnnnnnnnnnnnnnnnnnnnnnnnnnnnnnnnnnnnnnnnnnnnnnnnnnnnnnnnnnnnnnnnnnnnnnnnnnnnnnnnnnnnnnnnnnnnnnnnnnnnnnnnnnnnnnnnnnnnnnnnnnnnnnnnnnnnnnnnnnnnnnnnnnnnnnnnnnnnnnnnnnnnnnnnnnnnnnnnnnnnnnnnnnnnnnnnnnnnnnnnnnnnnnnnnnnnnnnnnnnnnnnnnnnnnnnnnnnnnnnnnnnnnnnnnnnnnnnnnnnnnnnnnnnnnnnnnnnnnnnnnnnnnnnnnnnnnnnnnnnnnnnnnnnnnnnnnnnnnnnnnnnnnnnnnnnnnnnnnnnnnnnnnnnnnnnnnnnnnnnnnnnnnnnnnnnnnnnnnnnnnnnnnnnnnnnnnnnnnnnnnnnnnnnnnnnnnnnnnnnnnnnnnnnnnnnnnnnnnnnnnnnnnnnnnnnnnnnnnnnnnnnnnnnnnnnnnnnnnnnnnnnnnnnnnnnnnnnnnnnnnnnnnnnnnnnnnnnnnnnnnnnnnnnnnnnnnnnnnnnnnnnnnnnnnnnnnnnnnnnnnnnnnnnnnnnnnnnnnnnnnnnnnnnnnnnnnnnnnnnnnnnnnnnnnnnnnnnnnnnnnnnnnnnnnnnnnnnnnnnnnnnnnnnnnnnnnnnnnnnnnnnnnnnnnnnnnnnnnnnnnnnnnnnnnnnnnnnnnnnnnnnnnnnnnnnnnnnnnnnnnnnnnnnnnnnnnnnnnnnnnnnnnnnnnnnnnnnnnnnnnnnnnnnnnnnnnnnnnnnnnnnnnnnnnnnnnnnnnnnnnnnnnnnnnnnnnnnnnnnnnnnnnnnnnnnnnnnnnnnnnnnnnnnnnnnnnnnnnnnnnnnnnnnnnnnnnnnnnnnnnnnnnnnnnnnnnnnnnnnnnnnnnnnnnnnnnnnnnnnnnnnnnnnnnnnnnnnnnnnnnnnnnnnnnnnnnnnnnnnnnnnnnnnnnnnnnnnnnnnnnnnnnnnnnnnnnnnnnnnnnnnnnnnnnnnnnnnnnnnnnnnnnnnnnnnnnnnnnnnnnnnnnnnnnnnnnnnnnnnnnnnnnnnnnnnnnnnnnnnnnnnnnnnnnnnnnnnnnnnnnnnnnnnnnnnnnnnnnnnnnnnnnnnnnnnnnnnnnnnnnnnnnnnnnnnnnnnnnnnnnnnnnnnnnnnnnnnnnnnnnnnnnnnnnnnnnnnnnnnnnnnnnnnnnnnnnnnnnnnnnnnnnnnnnnnnnnnnnnnnnnnnnnnnnnnnnnnnnnnnnnnnnnnnnnnnnnnnnnnnnnnnnnnnnnnnnnnnnnnnnnnnnnnnnnnnnnnnnnnnnnnnnnnnnnnnnnnnnnnnnnnnnnnnnnnnnnnnnnnnnnnnnnnnnnnnnnnnnnnnnnnnnnnnnnnnnnnnnnnnnnnnnnnnnnnnnnnnnnnnnnnnnnnnnnnnnnnnnnnnnnnnnnnnnnnnnnnnnnnnnnnnnnnnnnnnnnnnnnnnnnnnnnnnnnnnnnnnnnnnnnnnnnnnnnnnnnnnnnnnnnnnnnnnnnnnnnnnnnnnnnnnnnnnnnnnnnnnnnnnnnnnnnnnnnnnnnnnnnnnnnnnnnnnnnnnnnnnnnnnnnnnnnnnnnnnnnnnnnnnnnnnnnnnnnnnnnnnnnnnnnnnnnnnnnnnnnnnnnnnnnnnnnnnnnnnnnnnnnnnnnnnnnnnnnnnnnnnnnnnnnnnnnnnnnnnnnnnnnnnnnnnnnnnnnnnnnnnnnnnnnnnnnnnnnnnnnnnnnnnnnnnnnnnnnnnnnnnnnnnnnnnnnnnnnnnnnnnnnnnnnnnnnnnnnnnnnnnnnnnnnnnnnnnnnnnnnnnnnnnnnnnnnnnnnnnnnnnnnnnnnnnnnnnnnnnnnnnnnnnnnnnnnnnnnnnnnnnnnnnnnnnnnnnnnnnnnnnnnnnnnnnnnnnnnnnnnnnnnnnnnnnnnnnnnnnnnnnnnnnnnnnnnnnnnnnnnnnnnnnnnnnnnnnnnnnnnnnnnnnnnnnnnnnnnnnnnnnnnnnnnnnnnnnnnnnnnnnnnnnnnnnnnnnnnnnnnnnnnnnnnnnnnnnnnnnnnnnnnnnnnnnnnnnnnnnnnnnnnnnnnnnnnnnnnnnnnnnnnnnnnnnnnnnnnnnnnnnnnnnnnnnnnnnnnnnnnnnnnnnnnnnnnnnnnnnnnnnnnnnnnnnnnnnnnnnnnnnnnnnnnnnnnnnnnnnnnnnnnnnnnnnnnnnnnnnnnnnnnnnnnnnnnnnnnnnnnnnnnnnnnnnnnnnnnnnnnnnnnnnnnnnnnnnnnnnnnnnnnnnnnnnnnnnnnnnnnnnnnnnnnnnnnnnnnnnnnnnnnnnnnnnnnnnnnnnnnnnnnnnnnnnnnnnnnnnnnnnnnnnnnnnnnnnnnnnnnnnnnnnnnnnnnnnnnnnnnnnnnnnnnnnnnnnnnnnnnnnnnnnnnnnnnnnnnnnnnnnnnnnnnnnnnnnnnnnnnnnnnnnnnnnnnnnnnnnnnnnnnnnnnnnnnnnnnnnnnnnnnnnnnnnnnnnnnnnnnnnnnnnnnnnnnnnnnnnnnnnnnnnnnnnnnnnnnnnnnnnnnnnnnnnnnnnnnnnnnnnnnnnnnnnnnnnnnnnnnnnnnnnnnnnnnnnnnnnnnnnnnnnnnnnnnnnnnnnnnnnnnnnnnnnnnnnnnnnnnnnnnnnnnnnnnnnnnnnnnnnnnnnnnnnnnnnnnnnnnnnnnnnnnnnnnnnnnnnnnnnnnnnnnnnnnnnnnnnnnnnnnnnnnnnnnnnnnnnnnnnnnnnnnnnnnnnnnnnnnnnnnnnnnnnnnnnnnnnnnnnnnnnnnnnnnnnnnnnnnnnnnnnnnnnnnnnnnnnnnnnnnnnnnnnnnnnnnnnnnnnnnnnnnnnnnnnnnnnnnnnnnnnnnnnnnnnnnnnnnnnnnnnnnnnnnnnnnnnnnnnnnnnnnnnnnnnnnnnnnnnnnnnnnnnnnnnnnnnnnnnnnnnnnnnnnnnnnnnnnnnnnnnnnnnnnnnnnnnnnnnnnnnnnnnnnnnnnnnnnnnnnnnnnnnnnnnnnnnnnnnnnnnnnnnnnnnnnnnnnnnnnnnnnnnnnnnnnnnnnnnnnnnnnnnnnnnnnnnnnnnnnnnnnnnnnnnnnnnnnnnnnnnnnnnnnnnnnnnnnnnnnnnnnnnnnnnnnnnnnnnnnnnnnnnnnnnnnnnnnnnnnnnnnnnnnnnnnnnnnnnnnnnnnnnnnnnnnnnnnnnnnnnnnnnnnnnnnnnnnnnnnnnnnnnnnnnnnnnnnnnnnnnnnnnnnnnnnnnnnnnnnnnnnnnnnnnnnnnnnnnnnnnnnnnnnnnnnnnnnnnnnnnnnnnnnnnnnnnnnnnnnnnnnnnnnnnnnnnnnnnnnnnnnnnnnnnnnnnnnnnnnnnnnnnnnnnnnnnnnnnnnnnnnnnnnnnnnnnnnnnnnnnnnnnnnnnnnnnnnnnnnnnnnnnnnnnnnnnnnnnnnnnnnnnnnnnnnnnnnnnnnnnnnnnnnnnnnnnnnnnnnnnnnnnnnnnnnnnnnnnnnnnnnnnnnnnnnnnnnnnnnnnnnnnnnnnnnnnnnnnnnnnnnnnnnnnnnnnnnnnnnnnnnnnnnnnnnnnnnnnnnnnnnnnnnnnnnnnnnnnnnnnnnnnnnnnnnnnnnnnnnnnnnnnnnnnnnnnnnnnnnnnnnnnnnnnnnnnnnnnnnnnnnnnnnnnnnnnnnnnnnnnnnnnnnnnnnnnnnnnnnnnnnnnnnnnnnnnnnnnnnnnnnnnnnnnnnnnnnnnnnnnnnnnnnnnnnnnnnnnnnnnnnnnnnnnnnnnnnnnnnnnnnnnnnnnnnnnnnnnnnnnnnnnnnnnnnnnnnnnnnnnnnnnnnnnnnnnnnnnnnnnnnnnnnnnnnnnnnnnnnnnnnnnnnnnnnnnnnnnnnnnnnnnnnnnnnnnnnnnnnnnnnnnnnnnnnnnnnnnnnnnnnnnnnnnnnnnnnnnnnnnnnnnnnnnnnnnnnnnnnnnnnnnnnnnnnnnnnnnnnnnnnnnnnnnnnnnnnnnnnnnnnnnnnnnnnnnnnnnnnnnnnnnnnnnnnnnnnnnnnnnnnnnnnnnnnnnnnnnnnnnnnnnnnnnnnnnnnnnnnnnnnnnnnnnnnnnnnnnnnnnnnnnnnnnnnnnnnnnnnnnnnnnnnnnnnnnnnnnnnnnnnnnnnnnnnnnnnnnnnnnnnnnnnnnnnnnnnnnnnnnnnnnnnnnnnnnnnnnnnnnnnnnnnnnnnnnnnnnnnnnnnnnnnnnnnnnnnnnnnnnnnnnnnnnnnnnnnnnnnnnnnnnnnnnnnnnnnnnnnnnnnnnnnnnnnnnnnnnnnnnnnnnnnnnnnnnnnnnnnnnnnnnnnnnnnnnnnnnnnnnnnnnnnnnnnnnnnnnnnnnnnnnnnnnnnnnnnnnnnnnnnnnnnnnnnnnnnnnnnnnnnnnnnnnnnnnnnnnnnnnnnnnnnnnnnnnnnnnnnnnnnnnnnnnnnnnnnnnnnnnnnnnnnnnnnnnnnnnnnnnnnnnnnnnnnnnnnnnnnnnnnnnnnnnnnnnnnnnnnnnnnnnnnnnnnnnnnnnnnnnnnnnnnnnnnnnnnnnnnnnnnnnnnnnnnnnnnnnnnnnnnnnnnnnnnnnnnnnnnnnnnnnnnnnnnnnnnnnnnnnnnnnnnnnnnnnnnnnnnnnnnnnnnnnnnnnnnnnnnnnnnnnnnnnnnnnnnnnnnnnnnnnnnnnnnnnnnnnnnnnnnnnnnnnnnnnnnnnnnnnnnnnnnnnnnnnnnnnnnnnnnnnnnnnnnnnnnnnnnnnnnnnnnnnnnnnnnnnnnnnnnnnnnnnnnnnnnnnnnnnnnnnnnnnnnnnnnnnnnnnnnnnnnnnnnnnnnnnnnnnnnnnnnnnnnnnnnnnnnnnnnnnnnnnnnnnnnnnnnnnnnnnnnnnnnnnnnnnnnnnnnnnnnnnnnnnnnnnnnnnnnnnnnnnnnnnnnnnnnnnnnnnnnnnnnnnnnnnnnnnnnnnnnnnnnnnnnnnnnnnnnnnnnnnnnnnnnnnnnnnnnnnnnnnnnnnnnnnnnnnnnnnnnnnnnnnnnnnnnnnnnnnnnnnnnnnnnnnnnnnnnnnnnnnnnnnnnnnnnnnnnnnnnnnnnnnnnnnnnnnnnnnnnnnnnnnnnnnnnnnnnnnnnnnnnnnnnnnnnnnnnnnnnnnnnnnnnnnnnnnnnnnnnnnnnnnnnnnnnnnnnnnnnnnnnnnnnnnnnnnnnnnnnnnnnnnnnnnnnnnnnnnnnnnnnnnnnnnnnnnnnnnnnnnnnnnnnnnnnnnnnnnnnnnnnnnnnnnnnnnnnnnnnnnnnnnnnnnnnnnnnnnnnnnnnnnnnnnnnnnnnnnnnnnnnnnnnnnnnnnnnnnnnnnnnnnnnnnnnnnnnnnnnnnnnnnnnnnnnnnnnnnnnnnnnnnnnnnnnnnnnnnnnnnnnnnnnnnnnnnnnnnnnnnnnnnnnnnnnnnnnnnnnnnnnnnnnnnnnnnnnnnnnnnnnnnnnnnnnnnnnnnnnnnnnnnnnnnnnnnnnnnnnnnnnnnnnnnnnnnnnnnnnnnnnnnnnnnnnnnnnnnnnnnnnnnnnnnnnnnnnnnnnnnnnnnnnnnnnnnnnnnnnnnnnnnnnnnnnnnnnnnnnnnnnnnnnnnnnnnnnnnnnnnnnnnnnnnnnnnnnnnnnnnnnnnnnnnnnnnnnnnnnnnnnnnnnnnnnnnnnnnnnnnnnnnnnnnnnnnnnnnnnnnnnnnnnnnnnnnnnnnnnnnnnnnnnnnnnnnnnnnnnnnnnnnnnnnnnnnnnnnnnnnnnnnnnnnnnnnnnnnnnnnnnnnnnnnnnnnnnnnnnnnnnnnnnnnnnnnnnnnnnnnnnnnnnnnnnnnnnnnnnnnnnnnnnnnnnnnnnnnnnnnnnnnnnnnnnnnnnnnnnnnnnnnnnnnnnnnnnnnnnnnnnnnnnnnnnnnnnnnnnnnnnnnnnnnnnnnnnnnnnnnnnnnnnnnnnnnnnnnnnnnnnnnnnnnnnnnnnnnnnnnnnnnnnnnnnnnnnnnnnnnnnnnnnnnnnnnnnnnnnnnnnnnnnnnnnnnnnnnnnnnnnnnnnnnnnnnnnnnnnnnnnnnnnnnnnnnnnnnnnnnnnnnnnnnnnnnnnnnnnnnnnnnnnnnnnnnnnnnnnnnnnnnnnnnnnnnnnnnnnnnnnnnnnnnnnnnnnnnnnnnnnnnnnnnnnnnnnnnnnnnnnnnnnnnnnnnnnnnnnnnnnnnnnnnnnnnnnnnnnnnnnnnnnnnnnnnnnnnnnnnnnnnnnnnnnnnnnnnnnnnnnnnnnnnnnnnnnnnnnnnnnnnnnnnnnnnnnnnnnnnnnnnnnnnnnnnnnnnnnnnnnnnnnnnnnnnnnnnnnnnnnnnnnnnnnnnnnnnnnnnnnnnnnnnnnnnnnnnnnnnnnnnnnnnnnnnnnnnnnnnnnnnnnnnnnnnnnnnnnnnnnnnnnnnnnnnnnnnnnnnnnnnnnnnnnnnnnnnnnnnnnnnnnnnnnnnnnnnnnnnnnnnnnnnnnnnnnnnnnnnnnnnnnnnnnnnnnnnnnnnnnnnnnnnnnnnnnnnnnnnnnnnnnnnnnnnnnnnnnnnnnnnnnnnnnnnnnnnnnnnnnnnnnnnnnnnnnnnnnnnnnnnnnnnnnnnnnnnnnnnnnnnnnnnnnnnnnnnnnnnnnnnnnnnnnnnnnnnnnnnnnnnnnnnnnnnnnnnnnnnnnnnnnnnnnnnnnnnnnnnnnnnnnnnnnnnnnnnnnnnnnnnnnnnnnnnnnnnnnnnnnnnnnnnnnnnnnnnnnnnnnnnnnnnnnnnnnnnnnnnnnnnnnnnnnnnnnnnnnnnnnnnnnnnnnnnnnnnnnnnnnnnnnnnnnnnnnnnnnnnnnnnnnnnnnnnnnnnnnnnnnnnnnnnnnnnnnnnnnnnnnnnnnnnnnnnnnnnnnnnnnnnnnnnnnnnnnnnnnnnnnnnnnnnnnnnnnnnnnnnnnnnnnnnnnnnnnnnnnnnnnnnnnnnnnnnnnnnnnnnnnnnnnnnnnnnnnnnnnnnnnnnnnnnnnnnnnnnnnnnnnnnnnnnnnnnnnnnnnnnnnnnnnnnnnnnnnnnnnnnnnnnnnnnnnnnnnnnnnnnnnnnnnnnnnnnnnnnnnnnnnnnnnnnnnnnnnnnnnnnnnnnnnnnnnnnnnnnnnnnnnnnnnnnnnnnnnnnnnnnnnnnnnnnnnnnnnnnnnnnnnnnnnnnnnnnnnnnnnnnnnnnnnnnnnnnnnnnnnnnnnnnnnnnnnnnnnnnnnnnnnnnnnnnnnnnnnnnnnnnnnnnnnnnnnnnnnnnnnnnnnnnnnnnnnnnnnnnnnnnnnnnnnnnnnnnnnnnnnnnnnnnnnnnnnnnnnnnnnnnnnnnnnnnnnnnnnnnnnnnnnnnnnnnnnnnnnnnnnnnnnnnnnnnnnnnnnnnnnnnnnnnnnnnnnnnnnnnnnnnnnnnnnnnnnnnnnnnnnnnnnnnnnnnnnnnnnnnnnnnnnnnnnnnnnnnnnnnnnnnnnnnnnnnnnnnnnnnnnnnnnnnnnnnnnnnnnnnnnnnnnnnnnnnnnnnnnnnnnnnnnnnnnnnnnnnnnnnnnnnnnnnnnnnnnnnnnnnnnnnnnnnnnnnnnnnnnnnnnnnnnnnnnnnnnnnnnnnnnnnnnnnnnnnnnnnnnnnnnnnnnnnnnnnnnnnnnnnnnnnnnnnnnnnnnnnnnnnnnnnnnnnnnnnnnnnnnnnnnnnnnnnnnnnnnnnnnnnnnnnnnnnnnnnnnnnnnnnnnnnnnnnnnnnnnnnnnnnnnnnnnnnnnnnnnnnnnnnnnnnnnnnnnnnnnnnnnnnnnnnnnnnnnnnnnnnnnnnnnnnnnnnnnnnnnnnnnnnnnnnnnnnnnnnnnnnnnnnnnnnnnnnnnnnnnnnnnnnnnnnnnnnnnnnnnnnnnnnnnnnnnnnnnnnnnnnnnnnnnnnnnnnnnnnnnnnnnnnnnnnnnnnnnnnnnnnnnnnnnnnnnnnnnnnnnnnnnnnnnnnnnnnnnnnnnnnnnnnnnnnnnnnnnnnnnnnnnnnnnnnnnnnnnnnnnnnnnnnnnnnnnnnnnnnnnnnnnnnnnnnnnnnnnnnnnnnnnnnnnnnnnnnnnnnnnnnnnnnnnnnnnnnnnnnnnnnnnnnnnnnnnnnnnnnnnnnnnnnnnnnnnnnnnnnnnnnnnnnnnnnnnnnnnnnnnnnnnnnnnnnnnnnnnnnnnnnnnnnnnnnnnnnnnnnnnnnnnnnnnnnnnnnnnnnnnnnnnnnnnnnnnnnnnnnnnnnnnnnnnnnnnnnnnnnnnnnnnnnnnnnnnnnnnnnnnnnnnnnnnnnnnnnnnnnnnnnnnnnnnnnnnnnnnnnnnnnnnnnnnnnnnnnnnnnnnnnnnnnnnnnnnnnnnnnnnnnnnnnnnnnnnnnnnnnnnnnnnnnnnnnnnnnnnnnnnnnnnnnnnnnnnnnnnnnnnnnnnnnnnnnnnnnnnnnnnnnnnnnnnnnnnnnnnnnnnnnnnnnnnnnnnnnnnnnnnnnnnnnnnnnnnnnnnnnnnnnnnnnnnnnnnnnnnnnnnnnnnnnnnnnnnnnnnnnnnnnnnnnnnnnnnnnnnnnnnnnnnnnnnnnnnnnnnnnnnnnnnnnnnnnnnnnnnnnnnnnnnnnnnnnnnnnnnnnnnnnnnnnnnnnnnnnnnnnnnnnnnnnnnnnnnnnnnnnnnnnnnnnnnnnnnnnnnnnnnnnnnnnnnnnnnnnnnnnnnnnnnnnnnnnnnnnnnnnnnnnnnnnnnnnnnnnnnnnnnnnnnnnnnnnnnnnnnnnnnnnnnnnnnnnnnnnnnnnnnnnnnnnnnnnnnnnnnnnnnnnnnnnnnnnnnnnnnnnnnnnnnnnnnnnnnnnnnnnnnnnnnnnnnnnnnnnnnnnnnnnnnnnnnnnnnnnnnnnnnnnnnnnnnnnnnnnnnnnnnnnnnnnnnnnnnnnnnnnnnnnnnnnnnnnnnnnnnnnnnnnnnnnnnnnnnnnnnnnnnnnnnnnnnnnnnnnnnnnnnnnnnnnnnnnnnnnnnnnnnnnnnnnnnnnnnnnnnnnnnnnnnnnnnnnnnnnnnnnnnnnnnnnnnnnnnnnnnnnnnnnnnnnnnnnnnnnnnnnnnnnnnnnnnnnnnnnnnnnnnnnnnnnnnnnnnnnnnnnnnnnnnnnnnnnnnnnnnnnnnnnnnnnnnnnnnnnnnnnnnnnnnnnnnnnnnnnnnnnnnnnnnnnnnnnnnnnnnnnnnnnnnnnnnnnnnnnnnnnnnnnnnnnnnnnnnnnnnnnnnnnnnnnnnnnnnnnnnnnnnnnnnnnnnnnnnnnnnnnnnnnnnnnnnnnnnnnnnnnnnnnnnnnnnnnnnnnnnnnnnnnnnnnnnnnnnnnnnnnnnnnnnnnnnnnnnnnnnnnnnnnnnnnnnnnnnnnnnnnnnnnnnnnnnnnnnnnnnnnnnnnnnnnnnnnnnnnnnnnnnnnnnnnnnnnnnnnnnnnnnnnnnnnnnnnnnnnnnnnnnnnnnnnnnnnnnnnnnnnnnnnnnnnnnnnnnnnnnnnnnnnnnnnnnnnnnnnnnnnnnnnnnnnnnnnnnnnnnnnnnnnnnnnnnnnnnnnnnnnnnnnnnnnnnnnnnnnnnnnnnnnnnnnnnnnnnnnnnnnnnnnnnnnnnnnnnnnnnnnnnnnnnnnnnnnnnnnnnnnnnnnnnnnnnnnnnnnnnnnnnnnnnnnnnnnnnnnnnnnnnnnnnnnnnnnnnnnnnnnnnnnnnnnnnnnnnnnnnnnnnnnnnnnnnnnnnnnnnnnnnnnnnnnnnnnnnnnnnnnnnnnnnnnnnnnnnnnnnnnnnnnnnnnnnnnnnnnnnnnnnnnnnnnnnnnnnnnnnnnnnnnnnnnnnnnnnnnnnnnnnnnnnnnnnnnnnnnnnnnnnnnnnnnnnnnnnnnnnnnnnnnnnnnnnnnnnnnnnnnnnnnnnnnnnnnnnnnnnnnnnnnnnnnnnnnnnnnnnnnnnnnnnnnnnnnnnnnnnnnnnnnnnnnnnnnnnnnnnnnnnnnnnnnnnnnnnnnnnnnnnnnnnnnnnnnnnnnnnnnnnnnnnnnnnnnnnnnnnnnnnnnnnnnnnnnnnnnnnnnnnnnnnnnnnnnnnnnnnnnnnnnnnnnnnnnnnnnnnnnnnnnnnnnnnnnnnnnnnnnnnnnnnnnnnnnnnnnnnnnnnnnnnnnnnnnnnnnnnnnnnnnnnnnnnnnnnnnnnnnnnnnnnnnnnnnnnnnnnnnnnnnnnnnnnnnnnnnnnnnnnnnnnnnnnnnnnnnnnnnnnnnnnnnnnnnnnnnnnnnnnnnnnnnnnnnnnnnnnnnnnnnnnnnnnnnnnnnnnnnnnnnnnnnnnnnnnnnnnnnnnnnnnnnnnnnnnnnnnnnnnnnnnnnnnnnnnnnnnnnnnnnnnnnnnnnnnnnnnnnnnnnnnnnnnnnnnnnnnnnnnnnnnnnnnnnnnnnnnnnnnnnnnnnnnnnnnnnnnnnnnnnnnnnnnnnnnnnnnnnnnnnnnnnnnnnnnnnnnnnnnnnnnnnnnnnnnnnnnnnnnnnnnnnnnnnnnnnnnnnnnnnnnnnnnnnnnnnnnnnnnnnnnnnnnnnnnnnnnnnnnnnnnnnnnnnnnnnnnnnnnnnnnnnnnnnnnnnnnnnnnnnnnnnnnnnnnnnnnnnnnnnnnnnnnnnnnnnnnnnnnnnnnnnnnnnnnnnnnnnnnnnnnnnnnnnnnnnnnnnnnnnnnnnnnnnnnnnnnnnnnnnnnnnnnnnnnnnnnnnnnnnnnnnnnnnnnnnnnnnnnnnnnnnnnnnnnnnnnnnnnnnnnnnnnnnnnnnnnnnnnnnnnnnnnnnnnnnnnnnnnnnnnnnnnnnnnnnnnnnnnnnnnnnnnnnnnnnnnnnnnnnnnnnnnnnnnnnnnnnnnnnnnnnnnnnnnnnnnnnnnnnnnnnnnnnnnnnnnnnnnnnnnnnnnnnnnnnnnnnnnnnnnnnnnnnnnnnnnnnnnnnnnnnnnnnnnnnnnnnnnnnnnnnnnnnnnnnnnnnnnnnnnnnnnnnnnnnnnnnnnnnnnnnnnnnnnnnnnnnnnnnnnnnnnnnnnnnnnnnnnnnnnnnnnnnnnnnnnnnnnnnnnnnnnnnnnnnnnnnnnnnnnnnnnnnnnnnnnnnnnnnnnnnnnnnnnnnnnnnnnnnnnnnnnnnnnnnnnnnnnnnnnnnnnnnnnnnnnnnnnnnnnnnnnnnnnnnnnnnnnnnnnnnnnnnnnnnnnnnnnnnnnnnnnnnnnnnnnnnnnnnnnnnnnnnnnnnnnnnnnnnnnnnnnnnnnnnnnnnnnnnnnnnnnnnnnnnnnnnnnnnnnnnnnnnnnnnnnnnnnnnnnnnnnnnnnnnnnnnnnnnnnnnnnnnnnnnnnnnnnnnnnnnnnnnnnnnnnnnnnnnnnnnnnnnnnnnnnnnnnnnnnnnnnnnnnnnnnnnnnnnnnnnnnnnnnnnnnnnnnnnnnnnnnnnnnnnnnnnnnnnnnnnnnnnnnnnnnnnnnnnnnnnnnnnnnnnnnnnnnnnnnnnnnnnnnnnnnnnnnnnnnnnnnnnnnnnnnnnnnnnnnnnnnnnnnnnnnnnnnnnnnnnnnnnnnnnnnnnnnnnnnnnnnnnnnnnnnnnnnnnnnnnnnnnnnnnnnnnnnnnnnnnnnnnnnnnnnnnnnnnnnnnnnnnnnnnnnnnnnnnnnnnnnnnnnnnnnnnnnnnnnnnnnnnnnnnnnnnnnnnnnnnnnnnnnnnnnnnnnnnnnnnnnnnnnnnnnnnnnnnnnnnnnnnnnnnnnnnnnnnnnnnnnnnnnnnnnnnnnnnnnnnnnnnnnnnnnnnnnnnnnnnnnnnnnnnnnnnnnnnnnnnnnnnnnnnnnnnnnnnnnnnnnnnnnnnnnnnnnnnnnnnnnnnnnnnnnnnnnnnnnnnnnnnnnnnnnnnnnnnnnnnnnnnnnnnnnnnnnnnnnnnnnnnnnnnnnnnnnnnnnnnnnnnnnnnnnnnnnnnnnnnnnnnnnnnnnnnnnnnnnnnnnnnnnnnnnnnnnnnnnnnnnnnnnnnnnnnnnnnnnnnnnnnnnnnnnnnnnnnnnnnnnnnnnnnnnnnnnnnnnnnnnnnnnnnnnnnnnnnnnnnnnnnnnnnnnnnnnnnnnnnnnnnnnnnnnnnnnnnnnnnnnnnnnnnnnnnnnnnnnnnnnnnnnnnnnnnnnnnnnnnnnnnnnnnnnnnnnnnnnnnnnnnnnnnnnnnnnnnnnnnnnnnnnnnnnnnnnnnnnnnnnnnnnnnnnnnnnnnnnnnnnnnnnnnnnnnnnnnnnnnnnnnnnnnnnnnnnnnnnnnnnnnnnnnnnnnnnnnnnnnnnnnnnnnnnnnnnnnnnnnnnnnnnnnnnnnnnnnnnnnnnnnnnnnnnnnnnnnnnnnnnnnnnnnnnnnnnnnnnnnnnnnnnnnnnnnnnnnnnnnnnnnnnnnnnnnnnnnnnnnnnnnnnnnnnnnnnnnnnnnnnnnnnnnnnnnnnnnnnnnnnnnnnnnnnnnnnnnnnnnnnnnnnnnnnnnnnnnnnnnnnnnnnnnnnnnnnnnnnnnnnnnnnnnnnnnnnnnnnnnnnnnnnnnnnnnnnnnnnnnnnnnnnnnnnnnnnnnnnnnnnnnnnnnnnnnnnnnnnnnnnnnnnnnnnnnnnnnnnnnnnnnnnnnnnnnnnnnnnnnnnnnnnnnnnnnnnnnnnnnnnnnnnnnnnnnnnnnnnnnnnnnnnnnnnnnnnnnnnnnnnnnnnnnnnnnnnnnnnnnnnnnnnnnnnnnnnnnnnnnnnnnnnnnnnnnnnnnnnnnnnnnnnnnnnnnnnnnnnnnnnnnnnnnnnnnnnnnnnnnnnnnnnnnnnnnnnnnnnnnnnnnnnnnnnnnnnnnnnnnnnnnnnnnnnnnnnnnnnnnnnnnnnnnnnnnnnnnnnnnnnnnnnnnnnnnnnnnnnnnnnnnnnnnnnnnnnnnnnnnnnnnnnnnnnnnnnnnnnnnnnnnnnnnnnnnnnnnnnnnnnnnnnnnnnnnnnnnnnnnnnnnnnnnnnnnnnnnnnnnnnnnnnnnnnnnnnnnnnnnnnnnnnnnnnnnnnnnnnnnnnnnnnnnnnnnnnnnnnnnnnnnnnnnnnnnnnnnnnnnnnnnnnnnnnnnnnnnnnnnnnnnnnnnnnnnnnnnnnnnnnnnnnnnnnnnnnnnnnnnnnnnnnnnnnnnnnnnnnnnnnnnnnnnnnnnnnnnnnnnnnnnnnnnnnnnnnnnnnnnnnnnnnnnnnnnnnnnnnnnnnnnnnnnnnnnnnnnnnnnnnnnnnnnnnnnnnnnnnnnnnnnnnnnnnnnnnnnnnnnnnnnnnnnnnnnnnnnnnnnnnnnnnnnnnnnnnnnnnnnnnnnnnnnnnnnnnnnnnnnnnnnnnnnnnnnnnnnnnnnnnnnnnnnnnnnnnnnnnnnnnnnnnnnnnnnnnnnnnnnnnnnnnnnnnnnnnnnnnnnnnnnnnnnnnnnnnnnnnnnnnnnnnnnnnnnnnnnnnnnnnnnnnnnnnnnnnnnnnnnnnnnnnnnnnnnnnnnnnnnnnnnnnnnnnnnnnnnnnnnnnnnnnnnnnnnnnnnnnnnnnnnnnnnnnnnnnnnnnnnnnnnnnnnnnnnnnnnnnnnnnnnnnnnnnnnnnnnnnnnnnnnnnnnnnnnnnnnnnnnnnnnnnnnnnnnnnnnnnnnnnnnnnnnnnnnnnnnnnnnnnnnnnnnnnnnnnnnnnnnnnnnnnnnnnnnnnnnnnnnnnnnnnnnnnnnnnnnnnnnnnnnnnnnnnnnnnnnnnnnnnnnnnnnnnnnnnnnnnnnnnnnnnnnnnnnnnnnnnnnnnnnnnnnnnnnnnnnnnnnnnnnnnnnnnnnnnnnnnnnnnnnnnnnnnnnnnnnnnnnnnnnnnnnnnnnnnnnnnnnnnnnnnnnnnnnnnnnnnnnnnnnnnnnnnnnnnnnnnnnnnnnnnnnnnnnnnnnnnnnnnnnnnnnnnnnnnnnnnnnnnnnnnnnnnnnnnnnnnnnnnnnnnnnnnnnnnnnnnnnnnnnnnnnnnnnnnnnnnnnnnnnnnnnnnnnnnnnnnnnnnnnnnnnnnnnnnnnnnnnnnnnnnnnnnnnnnnnnnnnnnnnnnnnnnnnnnnnnnnnnnnnnnnnnnnnnnnnnnnnnnnnnnnnnnnnnnnnnnnnnnnnnnnnnnnnnnnnnnnnnnnnnnnnnnnnnnnnnnnnnnnnnnnnnnnnnnnnnnnnnnnnnnnnnnnnnnnnnnnnnnnnnnnnnnnnnnnnnnnnnnnnnnnnnnnnnnnnnnnnnnnnnnnnnnnnnnnnnnnnnnnnnnnnnnnnnnnnnnnnnnnnnnnnnnnnnnnnnnnnnnnnnnnnnnnnnnnnnnnnnnnnnnnnnnnnnnnnnnnnnnnnnnnnnnnnnnnnnnnnnnnnnnnnnnnnnnnnnnnnnnnnnnnnnnnnnnnnnnnnnnnnnnnnnnnnnnnnnnnnnnnnnnnnnnnnnnnnnnnnnnnnnnnnnnnnnnnnnnnnnnnnnnnnnnnnnnnnnnnnnnnnnnnnnnnnnnnnnnnnnnnnnnnnnnnnnnnnnnnnnnnnnnnnnnnnnnnnnnnnnnnnnnnnnnnnnnnnnnnnnnnnnnnnnnnnnnnnnnnnnnnnnnnnnnnnnnnnnnnnnnnnnnnnnnnnnnnnnnnnnnnnnnnnnnnnnnnnnnnnnnnnnnnnnnnnnnnnnnnnnnnnnnnnnnnnnnnnnnnnnnnnnnnnnnnnnnnnnnnnnnnnnnnnnnnnnnnnnnnnnnnnnnnnnnnnnnnnnnnnnnnnnnnnnnnnnnnnnnnnnnnnnnnnnnnnnnnnnnnnnnnnnnnnnnnnnnnnnnnnnnnnnnnnnnnnnnnnnnnnnnnnnnnnnnnnnnnnnnnnnnnnnnnnnnnnnnnnnnnnnnnnnnnnnnnnnnnnnnnnnnnnnnnnnnnnnnnnnnnnnnnnnnnnnnnnnnnnnnnnnnnnnnnnnnnnnnnnnnnnnnnnnnnnnnnnnnnnnnnnnnnnnnnnnnnnnnnnnnnnnnnnnnnnnnnnnnnnnnnnnnnnnnnnnnnnnnnnnnnnnnnnnnnnnnnnnnnnnnnnnnnnnnnnnnnnnnnnnnnnnnnnnnnnnnnnnnnnnnnnnnnnnnnnnnnnnnnnnnnnnnnnnnnnnnnnnnnnnnnnnnnnnnnnnnnnnnnnnnnnnnnnnnnnnnnnnnnnnnnnnnnnnnnnnnnnnnnnnnnnnnnnnnnnnnnnnnnnnnnnnnnnnnnnnnnnnnnnnnnnnnnnnnnnnnnnnnnnnnnnnnnnnnnnnnnnnnnnnnnnnnnnnnnnnnnnnnnnnnnnnnnnnnnnnnnnnnnnnnnnnnnnnnnnnnnnnnnnnnnnnnnnnnnnnnnnnnnnnnnnnnnnnnnnnnnnnnnnnnnnnnnnnnnnnnnnnnnnnnnnnnnnnnnnnnnnnnnnnnnnnnnnnnnnnnnnnnnnnnnnnnnnnnnnnnnnnnnnnnnnnnnnnnnnnnnnnnnnnnnnnnnnnnnnnnnnnnnnnnnnnnnnnnnnnnnnnnnnnnnnnnnnnnnnnnnnnnnnnnnnnnnnnnnnnnnnnnnnnnnnnnnnnnnnnnnnnnnnnnnnnnnnnnnnnnnnnnnnnnnnnnnnnnnnnnnnnnnnnnnnnnnnnnnnnnnnnnnnnnnnnnnnnnnnnnnnnnnnnnnnnnnnnnnnnnnnnnnnnnnnnnnnnnnnnnnnnnnnnnnnnnnnnnnnnnnnnnnnnnnnnnnnnnnnnnnnnnnnnnnnnnnnnnnnnnnnnnnnnnnnnnnnnnnnnnnnnnnnnnnnnnnnnnnnnnnnnnnnnnnnnnnnnnnnnnnnnnnnnnnnnnnnnnnnnnnnnnnnnnnnnnnnnnnnnnnnnnnnnnnnnnnnnnnnnnnnnnnnnnnnnnnnnnnnnnnnnnnnnnnnnnnnnnnnnnnnnnnnnnnnnnnnnnnnnnnnnnnnnnnnnnnnnnnnnnnnnnnnnnnnnnnnnnnnnnnnnnnnnnnnnnnnnnnnnnnnnnnnnnnnnnnnnnnnnnnnnnnnnnnnnnnnnnnnnnnnnnnnnnnnnnnnnnnnnnnnnnnnnnnnnnnnnnnnnnnnnnnnnnnnnnnnnnnnnnnnnnnnnnnnnnnnnnnnnnnnnnnnnnnnnnnnnnnnnnnnnnnnnnnnnnnnnnnnnnnnnnnnnnnnnnnnnnnnnnnnnnnnnnnnnnnnnnnnnnnnnnnnnnnnnnnnnnnnnnnnnnnnnnnnnnnnnnnnnnnnnnnnnnnnnnnnnnnnnnnnnnnnnnnnnnnnnnnnnnnnnnnnnnnnnnnnnnnnnnnnnnnnnnnnnnnnnnnnnnnnnnnnnnnnnnnnnnnnnnnnnnnnnnnnnnnnnnnnnnnnnnnnnnnnnnnnnnnnnnnnnnnnnnnnnnnnnnnnnnnnnnnnnnnnnnnnnnnnnnnnnnnnnnnnnnnnnnnnnnnnnnnnnnnnnnnnnnnnnnnnnnnnnnnnnnnnnnnnnnnnnnnnnnnnnnnnnnnnnnnnnnnnnnnnnnnnnnnnnnnnnnnnnnnnnnnnnnnnnnnnnnnnnnnnnnnnnnnnnnnnnnnnnnnnnnnnnnnnnnnnnnnnnnnnnnnnnnnnnnnnnnnnnnnnnnnnnnnnnnnnnnnnnnnnnnnnnnnnnnnnnnnnnnnnnnnnnnnnnnnnnnnnnnnnnnnnnnnnnnnnnnnnnnnnnnnnnnnnnnnnnnnnnnnnnnnnnnnnnnnnnnnnnnnnnnnnnnnnnnnnnnnnnnnnnnnnnnnnnnnnnnnnnnnnnnnnnnnnnnnnnnnnnnnnnnnnnnnnnnnnnnnnnnnnnnnnnnnnnnnnnnnnnnnnnnnnnnnnnnnnnnnnnnnnnnnnnnnnnnnnnnnnnnnnnnnnnnnnnnnnnnnnnnnnnnnnnnnnnnnnnnnnnnnnnnnnnnnnnnnnnnnnnnnnnnnnnnnnnnnnnnnnnnnnnnnnnnnnnnnnnnnnnnnnnnnnnnnnnnnnnnnnnnnnnnnnnnnnnnnnnnnnnnnnnnnnnnnnnnnnnnnnnnnnnnnnnnnnnnnnnnnnnnnnnnnnnnnnnnnnnnnnnnnnnnnnnnnnnnnnnnnnnnnnnnnnnnnnnnnnnnnnnnnnnnnnnnnnnnnnnnnnnnnnnnnnnnnnnnnnnnnnnnnnnnnnnnnnnnnnnnnnnnnnnnnnnnnnnnnnnnnnnnnnnnnnnnnnnnnnnnnnnnnnnnnnnnnnnnnnnnnnnnnnnnnnnnnnnnnnnnnnnnnnnnnnnnnnnnnnnnnnnnnnnnnnnnnnnnnnnnnnnnnnnnnnnnnnnnnnnnnnnnnnnnnnnnnnnnnnnnnnnnnnnnnnnnnnnnnnnnnnnnnnnnnnnnnnnnnnnnnnnnnnnnnnnnnnnnnnnnnnnnnnnnnnnnnnnnnnnnnnnnnnnnnnnnnnnnnnnnnnnnnnnnnnnnnnnnnnnnnnnnnnnnnnnnnnnnnnnnnnnnnnnnnnnnnnnnnnnnnnnnnnnnnnnnnnnnnnnnnnnnnnnnnnnnnnnnnnnnnnnnnnnnnnnnnnnnnnnnnnnnnnnnnnnnnnnnnnnnnnnnnnnnnnnnnnnnnnnnnnnnnnnnnnnnnnnnnnnnnnnnnnnnnnnnnnnnnnnnnnnnnnnnnnnnnnnnnnnnnnnnnnnnnnnnnnnnnnnnnnnnnnnnnnnnnnnnnnnnnnnnnnnnnnnnnnnnnnnnnnnnnnnnnnnnnnnnnnnnnnnnnnnnnnnnnnnnnnnnnnnnnnnnnnnnnnnnnnnnnnnnnnnnnnnnnnnnnnnnnnnnnnnnnnnnnnnnnnnnnnnnnnnnnnnnnnnnnnnnnnnnnnnnnnnnnnnnnnnnnnnnnnnnnnnnnnnnnnnnnnnnnnnnnnnnnnnnnnnnnnnnnnnnnnnnnnnnnnnnnnnnnnnnnnnnnnnnnnnnnnnnnnnnnnnnnnnnnnnnnnnnnnnnnnnnnnnnnnnnnnnnnnnnnnnnnnnnnnnnnnnnnnnnnnnnnnnnnnnnnnnnnnnnnnnnnnnnnnnnnnnnnnnnnnnnnnnnnnnnnnnnnnnnnnnnnnnnnnnnnnnnnnnnnnnnnnnnnnnnnnnnnnnnnnnnnnnnnnnnnnnnnnnnnnnnnnnnnnnnnnnnnnnnnnnnnnnnnnnnnnnnnnnnnnnnnnnnnnnnnnnnnnnnnnnnnnnnnnnnnnnnnnnnnnnnnnnnnnnnnnnnnnnnnnnnnnnnnnnnnnnnnnnnnnnnnnnnnnnnnnnnnnnnnnnnnnnnnnnnnnnnnnnnnnnnnnnnnnnnnnnnnnnnnnnnnnnnnnnnnnnnnnnnnnnnnnnnnnnnnnnnnnnnnnnnnnnnnnnnnnnnnnnnnnnnnnnnnnnnnnnnnnnnnnnnnnnnnnnnnnnnnnnnnnnnnnnnnnnnnnnnnnnnnnnnnnnnnnnnnnnnnnnnnnnnnnnnnnnnnnnnnnnnnnnnnnnnnnnnnnnnnnnnnnnnnnnnnnnnnnnnnnnnnnnnnnnnnnnnnnnnnnnnnnnnnnnnnnnnnnnnnnnnnnnnnnnnnnnnnnnnnnnnnnnnnnnnnnnnnnnnnnnnnnnnnnnnnnnnnnnnnnnnnnnnnnnnnnnnnnnnnnnnnnnnnnnnnnnnnnnnnnnnnnnnnnnnnnnnnnnnnnnnnnnnnnnnnnnnnnnnnnnnnnnnnnnnnnnnnnnnnnnnnnnnnnnnnnnnnnnnnnnnnnnnnnnnnnnnnnnnnnnnnnnnnnnnnnnnnnnnnnnnnnnnnnnnnnnnnnnnnnnnnnnnnnnnnnnnnnnnnnnnnnnnnnnnnnnnnnnnnnnnnnnnnnnnnnnnnnnnnnnnnnnnnnnnnnnnnnnnnnnnnnnnnnnnnnnnnnnnnnnnnnnnnnnnnnnnnnnnnnnnnnnnnnnnnnnnnnnnnnnnnnnnnnnnnnnnnnnnnnnnnnnnnnnnnnnnnnnnnnnnnnnnnnnnnnnnnnnnnnnnnnnnnnnnnnnnnnnnnnnnnnnnnnnnnnnnnnnnnnnnnnnnnnnnnnnnnnnnnnnnnnnnnnnnnnnnnnnnnnnnnnnnnnnnnnnnnnnnnnnnnnnnnnnnnnnnnnnnnnnnnnnnnnnnnnnnnnnnnnnnnnnnnnnnnnnnnnnnnnnnnnnnnnnnnnnnnnnnnnnnnnnnnnnnnnnnnnnnnnnnnnnnnnnnnnnnnnnnnnnnnnnnnnnnnnnnnnnnnnnnnnnnnnnnnnnnnnnnnnnnnnnnnnnnnnnnnnnnnnnnnnnnnnnnnnnnnnnnnnnnnnnnnnnnnnnnnnnnnnnnnnnnnnnnnnnnnnnnnnnnnnnnnnnnnnnnnnnnnnnnnnnnnnnnnnnnnnnnnnnnnnnnnnnnnnnnnnnnnnnnnnnnnnnnnnnnnnnnnnnnnnnnnnnnnnnnnnnnnnnnnnnnnnnnnnnnnnnnnnnnnnnnnnnnnnnnnnnnnnnnnnnnnnnnnnnnnnnnnnnnnnnnnnnnnnnnnnnnnnnnnnnnnnnnnnnnnnnnnnnnnnnnnnnnnnnnnnnnnnnnnnnnnnnnnnnnnnnnnnnnnnnnnnnnnnnnnnnnnnnnnnnnnnnnnnnnnnnnnnnnnnnnnnnnnnnnnnnnnnnnnnnnnnnnnnnnnnnnnnnnnnnnnnnnnnnnnnnnnnnnnnnnnnnnnnnnnnnnnnnnnnnnnnnnnnnnnnnnnnnnnnnnnnnnnnnnnnnnnnnnnnnnnnnnnnnnnnnnnnnnnnnnnnnnnnnnnnnnnnnnnnnnnnnnnnnnnnnnnnnnnnnnnnnnnnnnnnnnnnnnnnnnnnnnnnnnnnnnnnnnnnnnnnnnnnnnnnnnnnnnnnnnnnnnnnnnnnnnnnnnnnnnnnnnnnnnnnnnnnnnnnnnnnnnnnnnnnnnnnnnnnnnnnnnnnnnnnnnnnnnnnnnnnnnnnnnnnnnnnnnnnnnnnnnnnnnnnnnnnnnnnnnnnnnnnnnnnnnnnnnnnnnnnnnnnnnnnnnnnnnnnnnnnnnnnnnnnnnnnnnnnnnnnnnnnnnnnnnnnnnnnnnnnnnnnnnnnnnnnnnnnnnnnnnnnnnnnnnnnnnnnnnnnnnnnnnnnnnnnnnnnnnnnnnnnnnnnnnnnnnnnnnnnnnnnnnnnnnnnnnnnnnnnnnnnnnnnnnnnnnnnnnnnnnnnnnnnnnnnnnnnnnnnnnnnnnnnnnnnnnnnnnnnnnnnnnnnnnnnnnnnnnnnnnnnnnnnnnnnnnnnnnnnnnnnnnnnnnnnnnnnnnnnnnnnnnnnnnnnnnnnnnnnnnnnnnnnnnnnnnnnnnnnnnnnnnnnnnnnnnnnnnnnnnnnnnnnnnnnnnnnnnnnnnnnnnnnnnnnnnnnnnnnnnnnnnnnnnnnnnnnnnnnnnnnnnnnnnnnnnnnnnnnnnnnnnnnnnnnnnnnnnnnnnnnnnnnnnnnnnnnnnnnnnnnnnnnnnnnnnnnnnnnnnnnnnnnnnnnnnnnnnnnnnnnnnnnnnnnnnnnnnnnnnnnnnnnnnnnnnnnnnnnnnnnnnnnnnnnnnnnnnnnnnnnnnnnnnnnnnnnnnnnnnnnnnnnnnnnnnnnnnnnnnnnnnnnnnnnnnnnnnnnnnnnnnnnnnnnnnnnnnnnnnnnnnnnnnnnnnnnnnnnnnnnnnnnnnnnnnnnnnnnnnnnnnnnnnnnnnnnnnnnnnnnnnnnnnnnnnnnnnnnnnnnnnnnnnnnnnnnnnnnnnnnnnnnnnnnnnnnnnnnnnnnnnnnnnnnnnnnnnnnnnnnnnnnnnnnnnnnnnnnnnnnnnnnnnnnnnnnnnnnnnnnnnnnnnnnnnnnnnnnnnnnnnnnnnnnnnnnnnnnnnnnnnnnnnnnnnnnnnnnnnnnnnnnnnnnnnnnnnnnnnnnnnnnnnnnnnnnnnnnnnnnnnnnnnnnnnnnnnnnnnnnnnnnnnnnnnnnnnnnnnnnnnnnnnnnnnnnnnnnnnnnnnnnnnnnnnnnnnnnnnnnnnnnnnnnnnnnnnnnnnnnnnnnnnnnnnnnnnnnnnnnnnnnnnnnnnnnnnnnnnnnnnnnnnnnnnnnnnnnnnnnnnnnnnnnnnnnnnnnnnnnnnnnnnnnnnnnnnnnnnnnnnnnnnnnnnnnnnnnnnnnnnnnnnnnnnnnnnnnnnnnnnnnnnnnnnnnnnnnnnnnnnnnnnnnnnnnnnnnnnnnnnnnnnnnnnnnnnnnnnnnnnnnnnnnnnnnnnnnnnnnnnnnnnnnnnnnnnnnnnnnnnnnnnnnnnnnnnnnnnnnnnnnnnnnnnnnnnnnnnnnnnnnnnnnnnnnnnnnnnnnnnnnnnnnnnnnnnnnnnnnnnnnnnnnnnnnnnnnnnnnnnnnnnnnnnnnnnnnnnnnnnnnnnnnnnnnnnnnnnnnnnnnnnnnnnnnnnnnnnnnnnnnnnnnnnnnnnnnnnnnnnnnnnnnnnnnnnnnnnnnnnnnnnnnnnnnnnnnnnnnnnnnnnnnnnnnnnnnnnnnnnnnnnnnnnnnnnnnnnnnnnnnnnnnnnnnnnnnnnnnnnnnnnnnnnnnnnnnnnnnnnnnnnnnnnnnnnnnnnnnnnnnnnnnnnnnnnnnnnnnnnnnnnnnnnnnnnnnnnnnnnnnnnnnnnnnnnnnnnnnnnnnnnnnnnnnnnnnnnnnnnnnnnnnnnnnnnnnnnnnnnnnnnnnnnnnnnnnnnnnnnnnnnnnnnnnnnnnnnnnnnnnnnnnnnnnnnnnnnnnnnnnnnnnnnnnnnnnnnnnnnnnnnnnnnnnnnnnnnnnnnnnnnnnnnnnnnnnnnnnnnnnnnnnnnnnnnnnnnnnnnnnnnnnnnnnnnnnnnnnnnnnnnnnnnnnnnnnnnnnnnnnnnnnnnnnnnnnnnnnnnnnnnnnnnnnnnnnnnnnnnnnnnnnnnnnnnnnnnnnnnnnnnnnnnnnnnnnnnnnnnnnnnnnnnnnnnnnnnnnnnnnnnnnnnnnnnnnnnnnnnnnnnnnnnnnnnnnnnnnnnnnnnnnnnnnnnnnnnnnnnnnnnnnnnnnnnnnnnnnnnnnnnnnnnnnnnnnnnnnnnnnnnnnnnnnnnnnnnnnnnnnnnnnnnnnnnnnnnnnnnnnnnnnnnnnnnnnnnnnnnnnnnnnnnnnnnnnnnnnnnnnnnnnnnnnnnnnnnnnnnnnnnnnnnnnnnnnnnnnnnnnnnnnnnnnnnnnnnnnnnnnnnnnnnnnnnnnnnnnnnnnnnnnnnnnnnnnnnnnnnnnnnnnnnnnnnnnnnnnnnnnnnnnnnnnnnnnnnnnnnnnnnnnnnnnnnnnnnnnnnnnnnnnnnnnnnnnnnnnnnnnnnnnnnnnnnnnnnnnnnnnnnnnnnnnnnnnnnnnnnnnnnnnnnnnnnnnnnnnnnnnnnnnnnnnnnnnnnnnnnnnnnnnnnnnnnnnnnnnnnnnnnnnnnnnnnnnnnnnnnnnnnnnnnnnnnnnnnnnnnnnnnnnnnnnnnnnnnnnnnnnnnnnnnnnnnnnnnnnnnnnnnnnnnnnnnnnnnnnnnnnnnnnnnnnnnnnnnnnnnnnnnnnnnnnnnnnnnnnnnnnnnnnnnnnnnnnnnnnnnnnnnnnnnnnnnnnnnnnnnnnnnnnnnnnnnnnnnnnnnnnnnnnnnnnnnnnnnnnnnnnnnnnnnnnnnnnnnnnnnnnnnnnnnnnnnnnnnnnnnnnnnnnnnnnnnnnnnnnnnnnnnnnnnnnnnnnnnnnnnnnnnnnnnnnnnnnnnnnnnnnnnnnnnnnnnnnnnnnnnnnnnnnnnnnnnnnnnnnnnnnnnnnnnnnnnnnnnnnnnnnnnnnnnnnnnnnnnnnnnnnnnnnnnnnnnnnnnnnnnnnnnnnnnnnnnnnnnnnnnnnnnnnnnnnnnnnnnnnnnnnnnnnnnnnnnnnnnnnnnnnnnnnnnnnnnnnnnnnnnnnnnnnnnnnnnnnnnnnnnnnnnnnnnnnnnnnnnnnnnnnnnnnnnnnnnnnnnnnnnnnnnnnnnnnnnnnnnnnnnnnnnnnnnnnnnnnnnnnnnnnnnnnnnnnnnnnnnnnnnnnnnnnnnnnnnnnnnnnnnnnnnnnnnnnnnnnnnnnnnnnnnnnnnnnnnnnnnnnnnnnnnnnnnnnnnnnnnnnnnnnnnnnnnnnnnnnnnnnnnnnnnnnnnnnnnnnnnnnnnnnnnnnnnnnnnnnnnnnnnnnnnnnnnnnnnnnnnnnnnnnnnnnnnnnnnnnnnnnnnnnnnnnnnnnnnnnnnnnnnnnnnnnnnnnnnnnnnnnnnnnnnnnnnnnnnnnnnnnnnnnnnnnnnnnnnnnnnnnnnnnnnnnnnnnnnnnnnnnnnnnnnnnnnnnnnnnnnnnnnnnnnnnnnnnnnnnnnnnnnnnnnnnnnnnnnnnnnnnnnnnnnnnnnnnnnnnnnnnnnnnnnnnnnnnnnnnnnnnnnnnnnnnnnnnnnnnnnnnnnnnnnnnnnnnnnnnnnnnnnnnnnnnnnnnnnnnnnnnnnnnnnnnnnnnnnnnnnnnnnnnnnnnnnnnnnnnnnnnnnnnnnnnnnnnnnnnnnnnnnnnnnnnnnnnnnnnnnnnnnnnnnnnnnnnnnnnnnnnnnnnnnnnnnnnnnnnnnnnnnnnnnnnnnnnnnnnnnnnnnnnnnnnnnnnnnnnnnnnnnnnnnnnnnnnnnnnnnnnnnnnnnnnnnnnnnnnnnnnnnnnnnnnnnnnnnnnnnnnnnnnnnnnnnnnnnnnnnnnnnnnnnnnnnnnnnnnnnnnnnnnnnnnnnnnnnnnnnnnnnnnnnnnnnnnnnnnnnnnnnnnnnnnnnnnnnnnnnnnnnnnnnnnnnnnnnnnnnnnnnnnnnnnnnnnnnnnnnnnnnnnnnnnnnnnnnnnnnnnnnnnnnnnnnnnnnnnnnnnnnnnnnnnnnnnnnnnnnnnnnnnnnnnnnnnnnnnnnnnnnnnnnnnnnnnnnnnnnnnnnnnnnnnnnnnnnnnnnnnnnnnnnnnnnnnnnnnnnnnnnnnnnnnnnnnnnnnnnnnnnnnnnnnnnnnnnnnnnnnnnnnnnnnnnnnnnnnnnnnnnnnnnnnnnnnnnnnnnnnnnnnnnnnnnnnnnnnnnnnnnnnnnnnnnnnnnnnnnnnnnnnnnnnnnnnnnnnnnnnnnnnnnnnnnnnnnnnnnnnnnnnnnnnnnnnnnnnnnnnnnnnnnnnnnnnnnnnnnnnnnnnnnnnnnnnnnnnnnnnnnnnnnnnnnnnnnnnnnnnnnnnnnnnnnnnnnnnnnnnnnnnnnnnnnnnnnnnnnnnnnnnnnnnnnnnnnnnnnnnnnnnnnnnnnnnnnnnnnnnnnnnnnnnnnnnnnnnnnnnnnnnnnnnnnnnnnnnnnnnnnnnnnnnnnnnnnnnnnnnnnnnnnnnnnnnnnnnnnnnnnnnnnnnnnnnnnnnnnnnnnnnnnnnnnnnnnnnnnnnnnnnnnnnnnnnnnnnnnnnnnnnnnnnnnnnnnnnnnnnnnnnnnnnnnnnnnnnnnnnnnnnnnnnnnnnnnnnnnnnnnnnnnnnnnnnnnnnnnnnnnnnnnnnnnnnnnnnnnnnnnnnnnnnnnnnnnnnnnnnnnnnnnnnnnnnnnnnnnnnnnnnnnnnnnnnnnnnnnnnnnnnnnnnnnnnnnnnnnnnnnnnnnnnnnnnnnnnnnnnnnnnnnnnnnnnnnnnnnnnnnnnnnnnnnnnnnnnnnnnnnnnnnnnnnnnnnnnnnnnnnnnnnnnnnnnnnnnnnnnnnnnnnnnnnnnnnnnnnnnnnnnnnnnnnnnnnnnnnnnnnnnnnnnnnnnnnnnnnnnnnnnnnnnnnnnnnnnnnnnnnnnnnnnnnnnnnnnnnnnnnnnnnnnnnnnnnnnnnnnnnnnnnnnnnnnnnnnnnnnnnnnnnnnnnnnnnnnnnnnnnnnnnnnnnnnnnnnnnnnnnnnnnnnnnnnnnnnnnnnnnnnnnnnnnnnnnnnnnnnnnnnnnnnnnnnnnnnnnnnnnnnnnnnnnnnnnnnnnnnnnnnnnnnnnnnnnnnnnnnnnnnnnnnnnnnnnnnnnnnnnnnnnnnnnnnnnnnnnnnnnnnnnnnnnnnnnnnnnnnnnnnnnnnnnnnnnnnnnnnnnnnnnnnnnnnnnnnnnnnnnnnnnnnnnnnnnnnnnnnnnnnnnnnnnnnnnnnnnnnnnnnnnnnnnnnnnnnnnnnnnnnnnnnnnnnnnnnnnnnnnnnnnnnnnnnnnnnnnnnnnnnnnnnnnnnnnnnnnnnnnnnnnnnnnnnnnnnnnnnnnnnnnnnnnnnnnnnnnnnnnnnnnnnnnnnnnnnnnnnnnnnnnnnnnnnnnnnnnnnnnnnnnnnnnnnnnnnnnnnnnnnnnnnnnnnnnnnnnnnnnnnnnnnnnnnnnnnnnnnnnnnnnnnnnnnnnnnnnnnnnnnnnnnnnnnnnnnnnnnnnnnnnnnnnnnnnnnnnnnnnnnnnnnnnnnnnnnnnnnnnnnnnnnnnnnnnnnnnnnnnnnnnnnnnnnnnnnnnnnnnnnnnnnnnnnnnnnnnnnnnnnnnnnnnnnnnnnnnnnnnnnnnnnnnnnnnnnnnnnnnnnnnnnnnnnnnnnnnnnnnnnnnnnnnnnnnnnnnnnnnnnnnnnnnnnnnnnnnnnnnnnnnnnnnnnnnnnnnnnnnnnnnnnnnnnnnnnnnnnnnnnnnnnnnnnnnnnnnnnnnnnnnnnnnnnnnnnnnnnnnnnnnnnnnnnnnnnnnnnnnnnnnnnnnnnnnnnnnnnnnnnnnnnnnnnnnnnnnnnnnnnnnnnnnnnnnnnnnnnnnnnnnnnnnnnnnnnnnnnnnnnnnnnnnnnnnnnnnnnnnnnnnnnnnnnnnnnnnnnnnnnnnnnnnnnnnnnnnnnnnnnnnnnnnnnnnnnnnnnnnnnnnnnnnnnnnnnnnnnnnnnnnnnnnnnnnnnnnnnnnnnnnnnnnnnnnnnnnnnnnnnnnnnnnnnnnnnnnnnnnnnnnnnnnnnnnnnnnnnnnnnnnnnnnnnnnnnnnnnnnnnnnnnnnnnnnnnnnnnnnnnnnnnnnnnnnnnnnnnnnnnnnnnnnnnnnnnnnnnnnnnnnnnnnnnnnnnnnnnnnnnnnnnnnnnnnnnnnnnnnnnnnnnnnnnnnnnnnnnnnnnnnnnnnnnnnnnnnnnnnnnnnnnnnnnnnnnnnnnnnnnnnnnnnnnnnnnnnnnnnnnnnnnnnnnnnnnnnnnnnnnnnnnnnnnnnnnnnnnnnnnnnnnnnnnnnnnnnnnnnnnnnnnnnnnnnnnnnnnnnnnnnnnnnnnnnnnnnnnnnnnnnnnnnnnnnnnnnnnnnnnnnnnnnnnnnnnnnnnnnnnnnnnnnnnnnnnnnnnnnnnnnnnnnnnnnnnnnnnnnnnnnnnnnnnnnnnnnnnnnnnnnnnnnnnnnnnnnnnnnnnnnnnnnnnnnnnnnnnnnnnnnnnnnnnnnnnnnnnnnnnnnnnnnnnnnnnnnnnnnnnnnnnnnnnnnnnnnnnnnnnnnnnnnnnnnnnnnnnnnnnnnnnnnnnnnnnnnnnnnnnnnnnnnnnnnnnnnnnnnnnnnnnnnnnnnnnnnnnnnnnnnnnnnnnnnnnnnnnnnnnnnnnnnnnnnnnnnnnnnnnnnnnnnnnnnnnnnnnnnnnnnnnnnnnnnnnnnnnnnnnnnnnnnnnnnnnnnnnnnnnnnnnnnnnnnnnnnnnnnnnnnnnnnnnnnnnnnnnnnnnnnnnnnnnnnnnnnnnnnnnnnnnnnnnnnnnnnnnnnnnnnnnnnnnnnnnnnnnnnnnnnnnnnnnnnnnnnnnnnnnnnnnnnnnnnnnnnnnnnnnnnnnnnnnnnnnnnnnnnnnnnnnnnnnnnnnnnnnnnnnnnnnnnnnnnnnnnnnnnnnnnnnnnnnnnnnnnnnnnnnnnnnnnnnnnnnnnnnnnnnnnnnnnnnnnnnnnnnnnnnnnnnnnnnnnnnnnnnnnnnnnnnnnnnnnnnnnnnnnnnnnnnnnnnnnnnnnnnnnnnnnnnnnnnnnnnnnnnnnnnnnnnnnnnnnnnnnnnnnnnnnnnnnnnnnnnnnnnnnnnnnnnnnnnnnnnnnnnnnnnnnnnnnnnnnnnnnnnnnnnnnnnnnnnnnnnnnnnnnnnnnnnnnnnnnnnnnnnnnnnnnnnnnnnnnnnnnnnnnnnnnnnnnnnnnnnnnnnnnnnnnnnnnnnnnnnnnnnnnnnnnnnnnnnnnnnnnnnnnnnnnnnnnnnnnnnnnnnnnnnnnnnnnnnnnnnnnnnnnnnnnnnnnnnnnnnnnnnnnnnnnnnnnnnnnnnnnnnnnnnnnnnnnnnnnnnnnnnnnnnnnnnnnnnnnnnnnnnnnnnnnnnnnnnnnnnnnnnnnnnnnnnnnnnnnnnnnnnnnnnnnnnnnnnnnnnnnnnnnnnnnnnnnnnnnnnnnnnnnnnnnnnnnnnnnnnnnnnnnnnnnnnnnnnnnnnnnnnnnnnnnnnnnnnnnnnnnnnnnnnnnnnnnnnnnnnnnnnnnnnnnnnnnnnnnnnnnnnnnnnnnnnnnnnnnnnnnnnnnnnnnnnnnnnnnnnnnnnnnnnnnnnnnnnnnnnnnnnnnnnnnnnnnnnnnnnnnnnnnnnnnnnnnnnnnnnnnnnnnnnnnnnnnnnnnnnnnnnnnnnnnnnnnnnnnnnnnnnnnnnnnnnnnnnnnnnnnnnnnnnnnnnnnnnnnnnnnnnnnnnnnnnnnnnnnnnnnnnnnnnnnnnnnnnnnnnnnnnnnnnnnnnnnnnnnnnnnnnnnnnnnnnnnnnnnnnnnnnnnnnnnnnnnnnnnnnnnnnnnnnnnnnnnnnnnnnnnnnnnnnnnnnnnnnnnnnnnnnnnnnnnnnnnnnnnnnnnnnnnnnnnnnnnnnnnnnnnnnnnnnnnnnnnnnnnnnnnnnnnnnnnnnnnnnnnnnnnnnnnnnnnnnnnnnnnnnnnnnnnnnnnnnnnnnnnnnnnnnnnnnnnnnnnnnnnnnnnnnnnnnnnnnnnnnnnnnnnnnnnnnnnnnnnnnnnnnnnnnnnnnnnnnnnnnnnnnnnnnnnnnnnnnnnnnnnnnnnnnnnnnnnnnnnnnnnnnnnnnnnnnnnnnnnnnnnnnnnnnnnnnnnnnnnnnnnnnnnnnnnnnnnnnnnnnnnnnnnnnnnnnnnnnnnnnnnnnnnnnnnnnnnnnnnnnnnnnnnnnnnnnnnnnnnnnnnnnnnnnnnnnnnnnnnnnnnnnnnnnnnnnnnnnnnnnnnnnnnnnnnnnnnnnnnnnnnnnnnnnnnnnnnnnnnnnnnnnnnnnnnnnnnnnnnnnnnnnnnnnnnnnnnnnnnnnnnnnnnnnnnnnnnnnnnnnnnnnnnnnnnnnnnnnnnnnnnnnnnnnnnnnnnnnnnnnnnnnnnnnnnnnnnnnnnnnnnnnnnnnnnnnnnnnnnnnnnnnnnnnnnnnnnnnnnnnnnnnnnnnnnnnnnnnnnnnnnnnnnnnnnnnnnnnnnnnnnnnnnnnnnnnnnnnnnnnnnnnnnnnnnnnnnnnnnnnnnnnnnnnnnnnnnnnnnnnnnnnnnnnnnnnnnnnnnnnnnnnnnnnnnnnnnnnnnnnnnnnnnnnnnnnnnnnnnnnnnnnnnnnnnnnnnnnnnnnnnnnnnnnnnnnnnnnnnnnnnnnnnnnnnnnnnnnnnnnnnnnnnnnnnnnnnnnnnnnnnnnnnnnnnnnnnnnnnnnnnnnnnnnnnnnnnnnnnnnnnnnnnnnnnnnnnnnnnnnnnnnnnnnnnnnnnnnnnnnnnnnnnnnnnnnnnnnnnnnnnnnnnnnnnnnnnnnnnnnnnnnnnnnnnnnnnnnnnnnnnnnnnnnnnnnnnnnnnnnnnnnnnnnnnnnnnnnnnnnnnnnnnnnnnnnnnnnnnnnnnnnnnnnnnnnnnnnnnnnnnnnnnnnnnnnnnnnnnnnnnnnnnnnnnnnnnnnnnnnnnnnnnnnnnnnnnnnnnnnnnnnnnnnnnnnnnnnnnnnnnnnnnnnnnnnnnnnnnnnnnnnnnnnnnnnnnnnnnnnnnnnnnnnnnnnnnnnnnnnnnnnnnnnnnnnnnnnnnnnnnnnnnnnnnnnnnnnnnnnnnnnnnnnnnnnnnnnnnnnnnnnnnnnnnnnnnnnnnnnnnnnnnnnnnnnnnnnnnnnnnnnnnnnnnnnnnnnnnnnnnnnnnnnnnnnnnnnnnnnnnnnnnnnnnnnnnnnnnnnnnnnnnnnnnnnnnnnnnnnnnnnnnnnnnnnnnnnnnnnnnnnnnnnnnnnnnnnnnnnnnnnnnnnnnnnnnnnnnnnnnnnnnnnnnnnnnnnnnnnnnnnnnnnnnnnnnnnnnnnnnnnnnnnnnnnnnnnnnnnnnnnnnnnnnnnnnnnnnnnnnnnnnnnnnnnnnnnnnnnnnnnnnnnnnnnnnnnnnnnnnnnnnnnnnnnnnnnnnnnnnnnnnnnnnnnnnnnnnnnnnnnnnnnnnnnnnnnnnnnnnnnnnnnnnnnnnnnnnnnnnnnnnnnnnnnnnnnnnnnnnnnnnnnnnnnnnnnnnnnnnnnnnnnnnnnnnnnnnnnnnnnnnnnnnnnnnnnnnnnnnnnnnnnnnnnnnnnnnnnnnnnnnnnnnnnnnnnnnnnnnnnnnnnnnnnnnnnnnnnnnnnnnnnnnnnnnnnnnnnnnnnnnnnnnnnnnnnnnnnnnnnnnnnnnnnnnnnnnnnnnnnnnnnnnnnnnnnnnnnnnnnnnnnnnnnnnnnnnnnnnnnnnnnnnnnnnnnnnnnnnnnnnnnnnnnnnnnnnnnnnnnnnnnnnnnnnnnnnnnnnnnnnnnnnnnnnnnnnnnnnnnnnnnnnnnnnnnnnnnnnnnnnnnnnnnnnnnnnnnnnnnnnnnnnnnnnnnnnnnnnnnnnnnnnnnnnnnnnnnnnnnnnnnnnnnnnnnnnnnnnnnnnnnnnnnnnnnnnnnnnnnnnnnnnnnnnnnnnnnnnnnnnnnnnnnnnnnnnnnnnnnnnnnnnnnnnnnnnnnnnnnnnnnnnnnnnnnnnnnnnnnnnnnnnnnnnnnnnnnnnnnnnnnnnnnnnnnnnnnnnnnnnnnnnnnnnnnnnnnnnnnnnnnnnnnnnnnnnnnnnnnnnnnnnnnnnnnnnnnnnnnnnnnnnnnnnnnnnnnnnnnnnnnnnnnnnnnnnnnnnnnnnnnnnnnnnnnnnnnnnnnnnnnnnnnnnnnnnnnnnnnnnnnnnnnnnnnnnnnnnnnnnnnnnnnnnnnnnnnnnnnnnnnnnnnnnnnnnnnnnnnnnnnnnnnnnnnnnnnnnnnnnnnnnnnnnnnnnnnnnnnnnnnnnnnnnnnnnnnnnnnnnnnnnnnnnnnnnnnnnnnnnnnnnnnnnnnnnnnnnnnnnnnnnnnnnnnnnnnnnnnnnnnnnnnnnnnnnnnnnnnnnnnnnnnnnnnnnnnnnnnnnnnnnnnnnnnnnnnnnnnnnnnnnnnnnnnnnnnnnnnnnnnnnnnnnnnnnnnnnnnnnnnnnnnnnnnnnnnnnnnnnnnnnnnnnnnnnnnnnnnnnnnnnnnnnnnnnnnnnnnnnnnnnnnnnnnnnnnnnnnnnnnnnnnnnnnnnnnnnnnnnnnnnnnnnnnnnnnnnnnnnnnnnnnnnnnnnnnnnnnnnnnnnnnnnnnnnnnnnnnnnnnnnnnnnnnnnnnnnnnnnnnnnnnnnnnnnnnnnnnnnnnnnnnnnnnnnnnnnnnnnnnnnnnnnnnnnnnnnnnnnnnnnnnnnnnnnnnnnnnnnnnnnnnnnnnnnnnnnnnnnnnnnnnnnnnnnnnnnnnnnnnnnnnnnnnnnnnnnnnnnnnnnnnnnnnnnnnnnnnnnnnnnnnnnnnnnnnnnnnnnnnnnnnnnnnnnnnnnnnnnnnnnnnnnnnnnnnnnnnnnnnnnnnnnnnnnnnnnnnnnnnnnnnnnnnnnnnnnnnnnnnnnnnnnnnnnnnnnnnnnnnnnnnnnnnnnnnnnnnnnnnnnnnnnnnnnnnnnnnnnnnnnnnnnnnnnnnnnnnnnnnnnnnnnnnnnnnnnnnnnnnnnnnnnnnnnnnnnnnnnnnnnnnnnnnnnnnnnnnnnnnnnnnnnnnnnnnnnnnnnnnnnnnnnnnnnnnnnnnnnnnnnnnnnnnnnnnnnnnnnnnnnnnnnnnnnnnnnnnnnnnnnnnnnnnnnnnnnnnnnnnnnnnnnnnnnnnnnnnnnnnnnnnnnnnnnnnnnnnnnnnnnnnnnnnnnnnnnnnnnnnnnnnnnnnnnnnnnnnnnnnnnnnnnnnnnnnnnnnnnnnnnnnnnnnnnnnnnnnnnnnnnnnnnnnnnnnnnnnnnnnnnnnnnnnnnnnnnnnnnnnnnnnnnnnnnnnnnnnnnnnnnnnnnnnnnnnnnnnnnnnnnnnnnnnnnnnnnnnnnnnnnnnnnnnnnnnnnnnnnnnnnnnnnnnnnnnnnnnnnnnnnnnnnnnnnnnnnnnnnnnnnnnnnnnnnnnnnnnnnnnnnnnnnnnnnnnnnnnnnnnnnnnnnnnnnnnnnnnnnnnnnnnnnnnnnnnnnnnnnnnnnnnnnnnnnnnnnnnnnnnnnnnnnnnnnnnnnnnnnnnnnnnnnnnnnnnnnnnnnnnnnnnnnnnnnnnnnnnnnnnnnnnnnnnnnnnnnnnnnnnnnnnnnnnnnnnnnnnnnnnnnnnnnnnnnnnnnnnnnnnnnnnnnnnnnnnnnnnnnnnnnnnnnnnnnnnnnnnnnnnnnnnnnnnnnnnnnnnnnnnnnnnnnnnnnnnnnnnnnnnnnnnnnnnnnnnnnnnnnnnnnnnnnnnnnnnnnnnnnnnnnnnnnnnnnnnnnnnnnnnnnnnnnnnnnnnnnnnnnnnnnnnnnnnnnnnnnnnnnnnnnnnnnnnnnnnnnnnnnnnnnnnnnnnnnnnnnnnnnnnnnnnnnnnnnnnnnnnnnnnnnnnnnnnnnnnnnnnnnnnnnnnnnnnnnnnnnnnnnnnnnnnnnnnnnnnnnnnnnnnnnnnnnnnnnnnnnnnnnnnnnnnnnnnnnnnnnnnnnnnnnnnnnnnnnnnnnnnnnnnnnnnnnnnnnnnnnnnnnnnnnnnnnnnnnnnnnnnnnnnnnnnnnnnnnnnnnnnnnnnnnnnnnnnnnnnnnnnnnnnnnnnnnnnnnnnnnnnnnnnnnnnnnnnnnnnnnnnnnnnnnnnnnnnnnnnnnnnnnnnnnnnnnnnnnnnnnnnnnnnnnnnnnnnnnnnnnnnnnnnnnnnnnnnnnnnnnnnnnnnnnnnnnnnnnnnnnnnnnnnnnnnnnnnnnnnnnnnnnnnnnnnnnnnnnnnnnnnnnnnnnnnnnnnnnnnnnnnnnnnnnnnnnnnnnnnnnnnnnnnnnnnnnnnnnnnnnnnnnnnnnnnnnnnnnnnnnnnnnnnnnnnnnnnnnnnnnnnnnnnnnnnnnnnnnnnnnnnnnnnnnnnnnnnnnnnnnnnnnnnnnnnnnnnnnnnnnnnnnnnnnnnnnnnnnnnnnnnnnnnnnnnnnnnnnnnnnnnnnnnnnnnnnnnnnnnnnnnnnnnnnnnnnnnnnnnnnnnnnnnnnnnnnnnnnnnnnnnnnnnnnnnnnnnnnnnnnnnnnnnnnnnnnnnnnnnnnnnnnnnnnnnnnnnnnnnnnnnnnnnnnnnnnnnnnnnnnnnnnnnnnnnnnnnnnnnnnnnnnnnnnnnnnnnnnnnnnnnnnnnnnnnnnnnnnnnnnnnnnnnnnnnnnnnnnnnnnnnnnnnnnnnnnnnnnnnnnnnnnnnnnnnnnnnnnnnnnnnnnnnnnnnnnnnnnnnnnnnnnnnnnnnnnnnnnnnnnnnnnnnnnnnnnnnnnnnnnnnnnnnnnnnnnnnnnnnnnnnnnnnnnnnnnnnnnnnnnnnnnnnnnnnnnnnnnnnnnnnnnnnnnnnnnnnnnnnnnnnnnnnnnnnnnnnnnnnnnnnnnnnnnnnnnnnnnnnnnnnnnnnnnnnnnnnnnnnnnnnnnnnnnnnnnnnnnnnnnnnnnnnnnnnnnnnnnnnnnnnnnnnnnnnnnnnnnnnnnnnnnnnnnnnnnnnnnnnnnnnnnnnnnnnnnnnnnnnnnnnnnnnnnnnnnnnnnnnnnnnnnnnnnnnnnnnnnnnnnnnnnnnnnnnnnnnnnnnnnnnnnnnnnnnnnnnnnnnnnnnnnnnnnnnnnnnnnnnnnnnnnnnnnnnnnnnnnnnnnnnnnnnnnnnnnnnnnnnnnnnnnnnnnnnnnnnnnnnnnnnnnnnnnnnnnnnnnnnnnnnnnnnnnnnnnnnnnnnnnnnnnnnnnnnnnnnnnnnnnnnnnnnnnnnnnnnnnnnnnnnnnnnnnnnnnnnnnnnnnnnnnnnnnnnnnnnnnnnnnnnnnnnnnnnnnnnnnnnnnnnnnnnnnnnnnnnnnnnnnnnnnnnnnnnnnnnnnnnnnnnnnnnnnnnnnnnnnnnnnnnnnnnnnnnnnnnnnnnnnnnnnnnnnnnnnnnnnnnnnnnnnnnnnnnnnnnnnnnnnnnnnnnnnnnnnnnnnnnnnnnnnnnnnnnnnnnnnnnnnnnnnnnnnnnnnnnnnnnnnnnnnnnnnnnnnnnnnnnnnnnnnnnnnnnnnnnnnnnnnnnnnnnnnnnnnnnnnnnnnnnnnnnnnnnnnnnnnnnnnnnnnnnnnnnnnnnnnnnnnnnnnnnnnnnnnnnnnnnnnnnnnnnnnnnnnnnnnnnnnnnnnnnnnnnnnnnnnnnnnnnnnnnnnnnnnnnnnnnnnnnnnnnnnnnnnnnnnnnnnnnnnnnnnnnnnnnnnnnnnnnnnnnnnnnnnnnnnnnnnnnnnnnnnnnnnnnnnnnnnnnnnnnnnnnnnnnnnnnnnnnnnnnnnnnnnnnnnnnnnnnnnnnnnnnnnnnnnnnnnnnnnnnnnnnnnnnnnnnnnnnnnnnnnnnnnnnnnnnnnnnnnnnnnnnnnnnnnnnnnnnnnnnnnnnnnnnnnnnnnnnnnnnnnnnnnnnnnnnnnnnnnnnnnnnnnnnnnnnnnnnnnnnnnnnnnnnnnnnnnnnnnnnnnnnnnnnnnnnnnnnnnnnnnnnnnnnnnnnnnnnnnnnnnnnnnnnnnnnnnnnnnnnnnnnnnnnnnnnnnnnnnnnnnnnnnnnnnnnnnnnnnnnnnnnnnnnnnnnnnnnnnnnnnnnnnnnnnnnnnnnnnnnnnnnnnnnnnnnnnnnnnnnnnnnnnnnnnnnnnnnnnnnnnnnnnnnnnnnnnnnnnnnnnnnnnnnnnnnnnnnnnnnnnnnnnnnnnnnnnnnnnnnnnnnnnnnnnnnnnnnnnnnnnnnnnnnnnnnnnnnnnnnnnnnnnnnnnnnnnnnnnnnnnnnnnnnnnnnnnnnnnnnnnnnnnnnnnnnnnnnnnnnnnnnnnnnnnnnnnnnnnnnnnnnnnnnnnnnnnnnnnnnnnnnnnnnnnnnnnnnnnnnnnnnnnnnnnnnnnnnnnnnnnnnnnnnnnnnnnnnnnnnnnnnnnnnnnnnnnnnnnnnnnnnnnnnnnnnnnnnnnnnnnnnnnnnnnnnnnnnnnnnnnnnnnnnnnnnnnnnnnnnnnnnnnnnnnnnnnnnnnnnnnnnnnnnnnnnnnnnnnnnnnnnnnnnnnnnnnnnnnnnnnnnnnnnnnnnnnnnnnnnnnnnnnnnnnnnnnnnnnnnnnnnnnnnnnnnnnnnnnnnnnnnnnnnnnnnnnnnnnnnnnnnnnnnnnnnnnnnnnnnnnnnnnnnnnnnnnnnnnnnnnnnnnnnnnnnnnnnnnnnnnnnnnnnnnnnnnnnnnnnnnnnnnnnnnnnnnnnnnnnnnnnnnnnnnnnnnnnnnnnnnnnnnnnnnnnnnnnnnnnnnnnnnnnnnnnnnnnnnnnnnnnnnnnnnnnnnnnnnnnnnnnnnnnnnnnnnnnnnnnnnnnnnnnnnnnnnnnnnnnnnnnnnnnnnnnnnnnnnnnnnnnnnnnnnnnnnnnnnnnnnnnnnnnnnnnnnnnnnnnnnnnnnnnnnnnnnnnnnnnnnnnnnnnnnnnnnnnnnnnnnnnnnnnnnnnnnnnnnnnnnnnnnnnnnnnnnnnnnnnnnnnnnnnnnnnnnnnnnnnnnnnnnnnnnnnnnnnnnnnnnnnnnnnnnnnnnnnnnnnnnnnnnnnnnnnnnnnnnnnnnnnnnnnnnnnnnnnnnnnnnnnnnnnnnnnnnnnnnnnnnnnnnnnnnnnnnnnnnnnnnnnnnnnnnnnnnnnnnnnnnnnnnnnnnnnnnnnnnnnnnnnnnnnnnnnnnnnnnnnnnnnnnnnnnnnnnnnnnnnnnnnnnnnnnnnnnnnnnnnnnnnnnnnnnnnnnnnnnnnnnnnnnnnnnnnnnnnnnnnnnnnnnnnnnnnnnnnnnnnnnnnnnnnnnnnnnnnnnnnnnnnnnnnnnnnnnnnnnnnnnnnnnnnnnnnnnnnnnnnnnnnnnnnnnnnnnnnnnnnnnnnnnnnnnnnnnnnnnnnnnnnnnnnnnnnnnnnnnnnnnnnnnnnnnnnnnnnnnnnnnnnnnnnnnnnnnnnnnnnnnnnnnnnnnnnnnnnnnnnnnnnnnnnnnnnnnnnnnnnnnnnnnnnnnnnnnnnnnnnnnnnnnnnnnnnnnnnnnnnnnnnnnnnnnnnnnnnnnnnnnnnnnnnnnnnnnnnnnnnnnnnnnnnnnnnnnnnnnnnnnnnnnnnnnnnnnnnnnnnnnnnnnnnnnnnnnnnnnnnnnnnnnnnnnnnnnnnnnnnnnnnnnnnnnnnnnnnnnnnnnnnnnnnnnnnnnnnnnnnnnnnnnnnnnnnnnnnnnnnnnnnnnnnnnnnnnnnnnnnnnnnnnnnnnnnnnnnnnnnnnnnnnnnnnnnnnnnnnnnnnnnnnnnnnnnnnnnnnnnnnnnnnnnnnnnnnnnnnnnnnnnnnnnnnnnnnnnnnnnnnnnnnnnnnnnnnnnnnnnnnnnnnnnnnnnnnnnnnnnnnnnnnnnnnnnnnnnnnnnnnnnnnnnnnnnnnnnnnnnnnnnnnnnnnnnnnnnnnnnnnnnnnnnnnnnnnnnnnnnnnnnnnnnnnnnnnnnnnnnnnnnnnnnnnnnnnnnnnnnnnnnnnnnnnnnnnnnnnnnnnnnnnnnnnnnnnnnnnnnnnnnnnnnnnnnnnnnnnnnnnnnnnnnnnnnnnnnnnnnnnnnnnnnnnnnnnnnnnnnnnnnnnnnnnnnnnnnnnnnnnnnnnnnnnnnnnnnnnnnnnnnnnnnnnnnnnnnnnnnnnnnnnnnnnnnnnnnnnnnnnnnnnnnnnnnnnnnnnnnnnnnnnnnnnnnnnnnnnnnnnnnnnnnnnnnnnnnnnnnnnnnnnnnnnnnnnnnnnnnnnnnnnnnnnnnnnnnnnnnnnnnnnnnnnnnnnnnnnnnnnnnnnnnnnnnnnnnnnnnnnnnnnnnnnnnnnnnnnnnnnnnnnnnnnnnnnnnnnnnnnnnnnnnnnnnnnnnnnnnnnnnnnnnnnnnnnnnnnnnnnnnnnnnnnnnnnnnnnnnnnnnnnnnnnnnnnnnnnnnnnnnnnnnnnnnnnnnnnnnnnnnnnnnnnnnnnnnnnnnnnnnnnnnnnnnnnnnnnnnnnnnnnnnnnnnnnnnnnnnnnnnnnnnnnnnnnnnnnnnnnnnnnnnnnnnnnnnnnnnnnnnnnnnnnnnnnnnnnnnnnnnnnnnnnnnnnnnnnnnnnnnnnnnnnnnnnnnnnnnnnnnnnnnnnnnnnnnnnnnnnnnnnnnnnnnnnnnnnnnnnnnnnnnnnnnnnnnnnnnnnnnnnnnnnnnnnnnnnnnnnnnnnnnnnnnnnnnnnnnnnnnnnnnnnnnnnnnnnnnnnnnnnnnnnnnnnnnnnnnnnnnnnnnnnnnnnnnnnnnnnnnnnnnnnnnnnnnnnnnnnnnnnnnnnnnnnnnnnnnnnnnnnnnnnnnnnnnnnnnnnnnnnnnnnnnnnnnnnnnnnnnnnnnnnnnnnnnnnnnnnnnnnnnnnnnnnnnnnnnnnnnnnnnnnnnnnnnnnnnnnnnnnnnnnnnnnnnnnnnnnnnnnnnnnnnnnnnnnnnnnnnnnnnnnnnnnnnnnnnnnnnnnnnnnnnnnnnnnnnnnnnnnnnnnnnnnnnnnnnnnnnnnnnnnnnnnnnnnnnnnnnnnnnnnnnnnnnnnnnnnnnnnnnnnnnnnnnnnnnnnnnnnnnnnnnnnnnnnnnnnnnnnnnnnnnnnnnnnnnnnnnnnnnnnnnnnnnnnnnnnnnnnnnnnnnnnnnnnnnnnnnnnnnnnnnnnnnnnnnnnnnnnnnnnnnnnnnnnnnnnnnnnnnnnnnnnnnnnnnnnnnnnnnnnnnnnnnnnnnnnnnnnnnnnnnnnnnnnnnnnnnnnnnnnnnnnnnnnnnnnnnnnnnnnnnnnnnnnnnnnnnnnnnnnnnnnnnnnnnnnnnnnnnnnnnnnnnnnnnnnnnnnnnnnnnnnnnnnnnnnnnnnnnnnnnnnnnnnnnnnnnnnnnnnnnnnnnnnnnnnnnnnnnnnnnnnnnnnnnnnnnnnnnnnnnnnnnnnnnnnnnnnnnnnnnnnnnnnnnnnnnnnnnnnnnnnnnnnnnnnnnnnnnnnnnnnnnnnnnnnnnnnnnnnnnnnnnnnnnnnnnnnnnnnnnnnnnnnnnnnnnnnnnnnnnnnnnnnnnnnnnnnnnnnnnnnnnnnnnnnnnnnnnnnnnnnnnnnnnnnnnnnnnnnnnnnnnnnnnnnnnnnnnnnnnnnnnnnnnnnnnnnnnnnnnnnnnnnnnnnnnnnnnnnnnnnnnnnnnnnnnnnnnnnnnnnnnnnnnnnnnnnnnnnnnnnnnnnnnnnnnnnnnnnnnnnnnnnnnnnnnnnnnnnnnnnnnnnnnnnnnnnnnnnnnnnnnnnnnnnnnnnnnnnnnnnnnnnnnnnnnnnnnnnnnnnnnnnnnnnnnnnnnnnnnnnnnnnnnnnnnnnnnnnnnnnnnnnnnnnnnnnnnnnnnnnnnnnnnnnnnnnnnnnnnnnnnnnnnnnnnnnnnnnnnnnnnnnnnnnnnnnnnnnnnnnnnnnnnnnnnnnnnnnnnnnnnnnnnnnnnnnnnnnnnnnnnnnnnnnnnnnnnnnnnnnnnnnnnnnnnnnnnnnnnnnnnnnnnnnnnnnnnnnnnnnnnnnnnnnnnnnnnnnnnnnnnnnnnnnnnnnnnnnnnnnnnnnnnnnnnnnnnnnnnnnnnnnnnnnnnnnnnnnnnnnnnnnnnnnnnnnnnnnnnnnnnnnnnnnnnnnnnnnnnnnnnnnnnnnnnnnnnnnnnnnnnnnnnnnnnnnnnnnnnnnnnnnnnnnnnnnnnnnnnnnnnnnnnnnnnnnnnnnnnnnnnnnnnnnnnnnnnnnnnnnnnnnnnnnnnnnnnnnnnnnnnnnnnnnnnnnnnnnnnnnnnnnnnnnnnnnnnnnnnnnnnnnnnnnnnnnnnnnnnnnnnnnnnnnnnnnnnnnnnnnnnnnnnnnnnnnnnnnnnnnnnnnnnnnnnnnnnnnnnnnnnnnnnnnnnnnnnnnnnnnnnnnnnnnnnnnnnnnnnnnnnnnnnnnnnnnnnnnnnnnnnnnnnnnnnnnnnnnnnnnnnnnnnnnnnnnnnnnnnnnnnnnnnnnnnnnnnnnnnnnnnnnnnnnnnnnnnnnnnnnnnnnnnnnnnnnnnnnnnnnnnnnnnnnnnnnnnnnnnnnnnnnnnnnnnnnnnnnnnnnnnnnnnnnnnnnnnnnnnnnnnnnnnnnnnnnnnnnnnnnnnnnnnnnnnnnnnnnnnnnnnnnnnnnnnnnnnnnnnnnnnnnnnnnnnnnnnnnnnnnnnnnnnnnnnnnnnnnnnnnnnnnnnnnnnnnnnnnnnnnnnnnnnnnnnnnnnnnnnnnnnnnnnnnnnnnnnnnnnnnnnnnnnnnnnnnnnnnnnnnnnnnnnnnnnnnnnnnnnnnnnnnnnnnnnnnnnnnnnnnnnnnnnnnnnnnnnnnnnnnnnnnnnnnnnnnnnnnnnnnnnnnnnnnnnnnnnnnnnnnnnnnnnnnnnnnnnnnnnnnnnnnnnnnnnnnnnnnnnnnnnnnnnnnnnnnnnnnnnnnnnnnnnnnnnnnnnnnnnnnnnnnnnnnnnnnnnnnnnnnnnnnnnnnnnnnnnnnnnnnnnnnnnnnnnnnnnnnnnnnnnnnnnnnnnnnnnnnnnnnnnnnnnnnnnnnnnnnnnnnnnnnnnnnnnnnnnnnnnnnnnnnnnnnnnnnnnnnnnnnnnnnnnnnnnnnnnnnnnnnnnnnnnnnnnnnnnnnnnnnnnnnnnnnnnnnnnnnnnnnnnnnnnnnnnnnnnnnnnnnnnnnnnnnnnnnnnnnnnnnnnnnnnnnnnnnnnnnnnnnnnnnnnnnnnnnnnnnnnnnnnnnnnnnnnnnnnnnnnnnnnnnnnnnnnnnnnnnnnnnnnnnnnnnnnnnnnnnnnnnnnnnnnnnnnnnnnnnnnnnnnnnnnnnnnnnnnnnnnnnnnnnnnnnnnnnnnnnnnnnnnnnnnnnnnnnnnnnnnnnnnnnnnnnnnnnnnnnnnnnnnnnnnnnnnnnnnnnnnnnnnnnnnnnnnnnnnnnnnnnnnnnnnnnnnnnnnnnnnnnnnnnnnnnnnnnnnnnnnnnnnnnnnnnnnnnnnnnnnnnnnnnnnnnnnnnnnnnnnnnnnnnnnnnnnnnnnnnnnnnnnnnnnnnnnnnnnnnnnnnnnnnnnnnnnnnnnnnnnnnnnnnnnnnnnnnnnnnnnnnnnnnnnnnnnnnnnnnnnnnnnnnnnnnnnnnnnnnnnnnnnnnnnnnnnnnnnnnnnnnnnnnnnnnnnnnnnnnnnnnnnnnnnnnnnnnnnnnnnnnnnnnnnnnnnnnnnnnnnnnnnnnnnnnnnnnnnnnnnnnnnnnnnnnnnnnnnnnnnnnnnnnnnnnnnnnnnnnnnnnnnnnnnnnnnnnnnnnnnnnnnnnnnnnnnnnnnnnnnnnnnnnnnnnnnnnnnnnnnnnnnnnnnnnnnnnnnnnnnnnnnnnnnnnnnnnnnnnnnnnnnnnnnnnnnnnnnnnnnnnnnnnnnnnnnnnnnnnnnnnnnnnnnnnnnnnnnnnnnnnnnnnnnnnnnnnnnnnnnnnnnnnnnnnnnnnnnnnnnnnnnnnnnnnnnnnnnnnnnnnnnnnnnnnnnnnnnnnnnnnnnnnnnnnnnnnnnnnnnnnnnnnnnnnnnnnnnnnnnnnnnnnnnnnnnnnnnnnnnnnnnnnnnnnnnnnnnnnnnnnnnnnnnnnnnnnnnnnnnnnnnnnnnnnnnnnnnnnnnnnnnnnnnnnnnnnnnnnnnnnnnnnnnnnnnnnnnnnnnnnnnnnnnnnnnnnnnnnnnnnnnnnnnnnnnnnnnnnnnnnnnnnnnnnnnnnnnnnnnnnnnnnnnnnnnnnnnnnnnnnnnnnnnnnnnnnnnnnnnnnnnnnnnnnnnnnnnnnnnnnnnnnnnnnnnnnnnnnnnnnnnnnnnnnnnnnnnnnnnnnnnnnnnnnnnnnnnnnnnnnnnnnnnnnnnnnnnnnnnnnnnnnnnnnnnnnnnnnnnnnnnnnnnnnnnnnnnnnnnnnnnnnnnnnnnnnnnnnnnnnnnnnnnnnnnnnnnnnnnnnnnnnnnnnnnnnnnnnnnnnnnnnnnnnnnnnnnnnnnnnnnnnnnnnnnnnnnnnnnnnnnnnnnnnnnnnnnnnnnnnnnnnnnnnnnnnnnnnnnnnnnnnnnnnnnnnnnnnnnnnnnnnnnnnnnnnnnnnnnnnnnnnnnnnnnnnnnnnnnnnnnnnnnnnnnnnnnnnnnnnnnnnnnnnnnnnnnnnnnnnnnnnnnnnnnnnnnnnnnnnnnnnnnnnnnnnnnnnnnnnnnnnnnnnnnnnnnnnnnnnnnnnnnnnnnnnnnnnnnnnnnnnnnnnnnnnnnnnnnnnnnnnnnnnnnnnnnnnnnnnnnnnnnnnnnnnnnnnnnnnnnnnnnnnnnnnnnnnnnnnnnnnnnnnnnnnnnnnnnnnnnnnnnnnnnnnnnnnnnnnnnnnnnnnnnnnnnnnnnnnnnnnnnnnnnnnnnnnnnnnnnnnnnnnnnnnnnnnnnnnnnnnnnnnnnnnnnnnnnnnnnnnnnnnnnnnnnnnnnnnnnnnnnnnnnnnnnnnnnnnnnnnnnnnnnnnnnnnnnnnnnnnnnnnnnnnnnnnnnnnnnnnnnnnnnnnnnnnnnnnnnnnnnnnnnnnnnnnnnnnnnnnnnnnnnnnnnnnnnnnnnnnnnnnnnnnnnnnnnnnnnnnnnnnnnnnnnnnnnnnnnnnnnnnnnnnnnnnnnnnnnnnnnnnnnnnnnnnnnnnnnnnnnnnnnnnnnnnnnnnnnnnnnnnnnnnnnnnnnnnnnnnnnnnnnnnnnnnnnnnnnnnnnnnnnnnnnnnnnnnnnnnnnnnnnnnnnnnnnnnnnnnnnnnnnnnnnnnnnnnnnnnnnnnnnnnnnnnnnnnnnnnnnnnnnnnnnnnnnnnnnnnnnnnnnnnnnnnnnnnnnnnnnnnnnnnnnnnnnnnnnnnnnnnnnnnnnnnnnnnnnnnnnnnnnnnnnnnnnnnnnnnnnnnnnnnnnnnnnnnnnnnnnnnnnnnnnnnnnnnnnnnnnnnnnnnnnnnnnnnnnnnnnnnnnnnnnnnnnnnnnnnnnnnnnnnnnnnnnnnnnnnnnnnnnnnnnnnnnnnnnnnnnnnnnnnnnnnnnnnnnnnnnnnnnnnnnnnnnnnnnnnnnnnnnnnnnnnnnnnnnnnnnnnnnnnnnnnnnnnnnnnnnnnnnnnnnnnnnnnnnnnnnnnnnnnnnnnnnnnnnnnnnnnnnnnnnnnnnnnnnnnnnnnnnnnnnnnnnnnnnnnnnnnnnnnnnnnnnnnnnnnnnnnnnnnnnnnnnnnnnnnnnnnnnnnnnnnnnnnnnnnnnnnnnnnnnnnnnnnnnnnnnnnnnnnnnnnnnnnnnnnnnnnnnnnnnnnnnnnnnnnnnnnnnnnnnnnnnnnnnnnnnnnnnnnnnnnnnnnnnnnnnnnnnnnnnnnnnnnnnnnnnnnnnnnnnnnnnnnnnnnnnnnnnnnnnnnnnnnnnnnnnnnnnnnnnnnnnnnnnnnnnnnnnnnnnnnnnnnnnnnnnnnnnnnnnnnnnnnnnnnnnnnnnnnnnnnnnnnnnnnnnnnnnnnnnnnnnnnnnnnnnnnnnnnnnnnnnnnnnnnnnnnnnnnnnnnnnnnnnnnnnnnnnnnnnnnnnnnnnnnnnnnnnnnnnnnnnnnnnnnnnnnnnnnnnnnnnnnnnnnnnnnnnnnnnnnnnnnnnnnnnnnnnnnnnnnnnnnnnnnnnnnnnnnnnnnnnnnnnnnnnnnnnnnnnnnnnnnnnnnnnnnnnnnnnnnnnnnnnnnnnnnnnnnnnnnnnnnnnnnnnnnnnnnnnnnnnnnnnnnnnnnnnnnnnnnnnnnnnnnnnnnnnnnnnnnnnnnnnnnnnnnnnnnnnnnnnnnnnnnnnnnnnnnnnnnnnnnnnnnnnnnnnnnnnnnnnnnnnnnnnnnnnnnnnnnnnnnnnnnnnnnnnnnnnnnnnnnnnnnnnnnnnnnnnnnnnnnnnnnnnnnnnnnnnnnnnnnnnnnnnnnnnnnnnnnnnnnnnnnnnnnnnnnnnnnnnnnnnnnnnnnnnnnnnnnnnnnnnnnnnnnnnnnnnnnnnnnnnnnnnnnnnnnnnnnnnnnnnnnnnnnnnnnnnnnnnnnnnnnnnnnnnnnnnnnnnnnnnnnnnnnnnnnnnnnnnnnnnnnnnnnnnnnnnnnnnnnnnnnnnnnnnnnnnnnnnnnnnnnnnnnnnnnnnnnnnnnnnnnnnnnnnnnnnnnnnnnnnnnnnnnnnnnnnnnnnnnnnnnnnnnnnnnnnnnnnnnnnnnnnnnnnnnnnnnnnnnnnnnnnnnnnnnnnnnnnnnnnnnnnnnnnnnnnnnnnnnnnnnnnnnnnnnnnnnnnnnnnnnnnnnnnnnnnnnnnnnnnnnnnnnnnnnnnnnnnnnnnnnnnnnnnnnnnnnnnnnnnnnnnnnnnnnnnnnnnnnnnnnnnnnnnnnnnnnnnnnnnnnnnnnnnnnnnnnnnnnnnnnnnnnnnnnnnnnnnnnnnnnnnnnnnnnnnnnnnnnnnnnnnnnnnnnnnnnnnnnnnnnnnnnnnnnnnnnnnnnnnnnnnnnnnnnnnnnnnnnnnnnnnnnnnnnnnnnnnnnnnnnnnnnnnnnnnnnnnnnnnnnnnnnnnnnnnnnnnnnnnnnnnnnnnnnnnnnnnnnnnnnnnnnnnnnnnnnnnnnnnnnnnnnnnnnnnnnnnnnnnnnnnnnnnnnnnnnnnnnnnnnnnnnnnnnnnnnnnnnnnnnnnnnnnnnnnnnnnnnnnnnnnnnnnnnnnnnnnnnnnnnnnnnnnnnnnnnnnnnnnnnnnnnnnnnnnnnnnnnnnnnnnnnnnnnnnnnnnnnnnnnnnnnnnnnnnnnnnnnnnnnnnnnnnnnnnnnnnnnnnnnnnnnnnnnnnnnnnnnnnnnnnnnnnnnnnnnnnnnnnnnnnnnnnnnnnnnnnnnnnnnnnnnnnnnnnnnnnnnnnnnnnnnnnnnnnnnnnnnnnnnnnnnnnnnnnnnnnnnnnnnnnnnnnnnnnnnnnnnnnnnnnnnnnnnnnnnnnnnnnnnnnnnnnnnnnnnnnnnnnnnnnnnnnnnnnnnnnnnnnnnnnnnnnnnnnnnnnnnnnnnnnnnnnnnnnnnnnnnnnnnnnnnnnnnnnnnnnnnnnnnnnnnnnnnnnnnnnnnnnnnnnnnnnnnnnnnnnnnnnnnnnnnnnnnnnnnnnnnnnnnnnnnnnnnnnnnnnnnnnnnnnnnnnnnnnnnnnnnnnnnnnnnnnnnnnnnnnnnnnnnnnnnnnnnnnnnnnnnnnnnnnnnnnnnnnnnnnnnnnnnnnnnnnnnnnnnnnnnnnnnnnnnnnnnnnnnnnnnnnnnnnnnnnnnnnnnnnnnnnnnnnnnnnnnnnnnnnnnnnnnnnnnnnnnnnnnnnnnnnnnnnnnnnnnnnnnnnnnnnnnnnnnnnnnnnnnnnnnnnnnnnnnnnnnnnnnnnnnnnnnnnnnnnnnnnnnnnnnnnnnnnnnnnnnnnnnnnnnnnnnnnnnnnnnnnnnnnnnnnnnnnnnnnnnnnnnnnnnnnnnnnnnnnnnnnnnnnnnnnnnnnnnnnnnnnnnnnnnnnnnnnnnnnnnnnnnnnnnnnnnnnnnnnnnnnnnnnnnnnnnnnnnnnnnnnnnnnnnnnnnnnnnnnnnnnnnnnnnnnnnnnnnnnnnnnnnnnnnnnnnnnnnnnnnnnnnnnnnnnnnnnnnnnnnnnnnnnnnnnnnnnnnnnnnnnnnnnnnnnnnnnnnnnnnnnnnnnnnnnnnnnnnnnnnnnnnnnnnnnnnnnnnnnnnnnnnnnnnnnnnnnnnnnnnnnnnnnnnnnnnnnnnnnnnnnnnnnnnnnnnnnnnnnnnnnnnnnnnnnnnnnnnnnnnnnnnnnnnnnnnnnnnnnnnnnnnnnnnnnnnnnnnnnnnnnnnnnnnnnnnnnnnnnnnnnnnnnnnnnnnnnnnnnnnnnnnnnnnnnnnnnnnnnnnnnnnnnnnnnnnnnnnnnnnnnnnnnnnnnnnnnnnnnnnnnnnnnnnnnnnnnnnnnnnnnnnnnnnnnnnnnnnnnnnnnnnnnnnnnnnnnnnnnnnnnnnnnnnnnnnnnnnnnnnnnnnnnnnnnnnnnnnnnnnnnnnnnnnnnnnnnnnnnnnnnnnnnnnnnnnnnnnnnnnnnnnnnnnnnnnnnnnnnnnnnnnnnnnnnnnnnnnnnnnnnnnnnnnnnnnnnnnnnnnnnnnnnnnnnnnnnnnnnnnnnnnnnnnnnnnnnnnnnnnnnnnnnnnnnnnnnnnnnnnnnnnnnnnnnnnnnnnnnnnnnnnnnnnnnnnnnnnnnnnnnnnnnnnnnnnnnnnnnnnnnnnnnnnnnnnnnnnnnnnnnnnnnnnnnnnnnnnnnnnnnnnnnnnnnnnnnnnnnnnnnnnnnnnnnnnnnnnnnnnnnnnnnnnnnnnnnnnnnnnnnnnnnnnnnnnnnnnnnnnnnnnnnnnnnnnnnnnnnnnnnnnnnnnnnnnnnnnnnnnnnnnnnnnnnnnnnnnnnnnnnnnnnnnnnnnnnnnnnnnnnnnnnnnnnnnnnnnnnnnnnnnnnnnnnnnnnnnnnnnnnnnnnnnnnnnnnnnnnnnnnnnnnnnnnnnnnnnnnnnnnnnnnnnnnnnnnnnnnnnnnnnnnnnnnnnnnnnnnnnnnnnnnnnnnnnnnnnnnnnnnnnnnnnnnnnnnnnnnnnnnnnnnnnnnnnnnnnnnnnnnnnnnnnnnnnnnnnnnnnnnnnnnnnnnnnnnnnnnnnnnnnnnnnnnnnnnnnnnnnnnnnnnnnnnnnnnnnnnnnnnnnnnnnnnnnnnnnnnnnnnnnnnnnnnnnnnnnnnnnnnnnnnnnnnnnnnnnnnnnnnnnnnnnnnnnnnnnnnnnnnnnnnnnnnnnnnnnnnnnnnnnnnnnnnnnnnnnnnnnnnnnnnnnnnnnnnnnnnnnnnnnnnnnnnnnnnnnnnnnnnnnnnnnnnnnnnnnnnnnnnnnnnnnnnnnnnnnnnnnnnnnnnnnnnnnnnnnnnnnnnnnnnnnnnnnnnnnnnnnnnnnnnnnnnnnnnnnnnnnnnnnnnnnnnnnnnnnnnnnnnnnnnnnnnnnnnnnnnnnnnnnnnnnnnnnnnnnnnnnnnnnnnnnnnnnnnnnnnnnnnnnnnnnnnnnnnnnnnnnnnnnnnnnnnnnnnnnnnnnnnnnnnnnnnnnnnnnnnnnnnnnnnnnnnnnnnnnnnnnnnnnnnnnnnnnnnnnnnnnnnnnnnnnnnnnnnnnnnnnnnnnnnnnnnnnnnnnnnnnnnnnnnnnnnnnnnnnnnnnnnnnnnnnnnnnnnnnnnnnnnnnnnnnnnnnnnnnnnnnnnnnnnnnnnnnnnnnnnnnnnnnnnnnnnnnnnnnnnnnnnnnnnnnnnnnnnnnnnnnnnnnnnnnnnnnnnnnnnnnnnnnnnnnnnnnnnnnnnnnnnnnnnnnnnnnnnnnnnnnnnnnnnnnnnnnnnnnnnnnnnnnnnnnnnnnnnnnnnnnnnnnnnnnnnnnnnnnnnnnnnnnnnnnnnnnnnnnnnnnnnnnnnnnnnnnnnnnnnnnnnnnnnnnnnnnnnnnnnnnnnnnnnnnnnnnnnnnnnnnnnnnnnnnnnnnnnnnnnnnnnnnnnnnnnnnnnnnnnnnnnnnnnnnnnnnnnnnnnnnnnnnnnnnnnnnnnnnnnnnnnnnnnnnnnnnnnnnnnnnnnnnnnnnnnnnnnnnnnnnnnnnnnnnnnnnnnnnnnnnnnnnnnnnnnnnnnnnnnnnnnnnnnnnnnnnnnnnnnnnnnnnnnnnnnnnnnnnnnnnnnnnnnnnnnnnnnnnnnnnnnnnnnnnnnnnnnnnnnnnnnnnnnnnnnnnnnnnnnnnnnnnnnnnnnnnnnnnnnnnnnnnnnnnnnnnnnnnnnnnnnnnnnnnnnnnnnnnnnnnnnnnnnnnnnnnnnnnnnnnnnnnnnnnnnnnnnnnnnnnnnnnnnnnnnnnnnnnnnnnnnnnnnnnnnnnnnnnnnnnnnnnnnnnnnnnnnnnnnnnnnnnnnnnnnnnnnnnnnnnnnnnnnnnnnnnnnnnnnnnnnnnnnnnnnnnnnnnnnnnnnnnnnnnnnnnnnnnnnnnnnnnnnnnnnnnnnnnnnnnnnnnnnnnnnnnnnnnnnnnnnnnnnnnnnnnnnnnnnnnnnnnnnnnnnnnnnnnnnnnnnnnnnnnnnnnnnnnnnnnnnnnnnnnnnnnnnnnnnnnnnnnnnnnnnnnnnnnnnnnnnnnnnnnnnnnnnnnnnnnnnnnnnnnnnnnnnnnnnnnnnnnnnnnnnnnnnnnnnnnnnnnnnnnnnnnnnnnnnnnnnnnnnnnnnnnnnnnnnnnnnnnnnnnnnnnnnnnnnnnnnnnnnnnnnnnnnnnnnnnnnnnnnnnnnnnnnnnnnnnnnnnnnnnnnnnnnnnnnnnnnnnnnnnnnnnnnnnnnnnnnnnnnnnnnnnnnnnnnnnnnnnnnnnnnnnnnnnnnnnnnnnnnnnnnnnnnnnnnnnnnnnnnnnnnnnnnnnnnnnnnnnnnnnnnnnnnnnnnnnnnnnnnnnnnnnnnnnnnnnnnnnnnnnnnnnnnnnnnnnnnnnnnnnnnnnnnnnnnnnnnnnnnnnnnnnnnnnnnnnnnnnnnnnnnnnnnnnnnnnnnnnnnnnnnnnnnnnnnnnnnnnnnnnnnnnnnnnnnnnnnnnnnnnnnnnnnnnnnnnnnnnnnnnnnnnnnnnnnnnnnnnnnnnnnnnnnnnnnnnnnnnnnnnnnnnnnnnnnnnnnnnnnnnnnnnnnnnnnnnnnnnnnnnnnnnnnnnnnnnnnnnnnnnnnnnnnnnnnnnnnnnnnnnnnnnnnnnnnnnnnnnnnnnnnnnnnnnnnnnnnnnnnnnnnnnnnnnnnnnnnnnnnnnnnnnnnnnnnnnnnnnnnnnnnnnnnnnnnnnnnnnnnnnnnnnnnnnnnnnnnnnnnnnnnnnnnnnnnnnnnnnnnnnnnnnnnnnnnnnnnnnnnnnnnnnnnnnnnnnnnnnnnnnnnnnnnnnnnnnnnnnnnnnnnnnnnnnnnnnnnnnnnnnnnnnnnnnnnnnnnnnnnnnnnnnnnnnnnnnnnnnnnnnnnnnnnnnnnnnnnnnnnnnnnnnnnnnnnnnnnnnnnnnnnnnnnnnnnnnnnnnnnnnnnnnnnnnnnnnnnnnnnnnnnnnnnnnnnnnnnnnnnnnnnnnnnnnnnnnnnnnnnnnnnnnnnnnnnnnnnnnnnnnnnnnnnnnnnnnnnnnnnnnnnnnnnnnnnnnnnnnnnnnnnnnnnnnnnnnnnnnnnnnnnnnnnnnnnnnnnnnnnnnnnnnnnnnnnnnnnnnnnnnnnnnnnnnnnnnnnnnnnnnnnnnnnnnnnnnnnnnnnnnnnnnnnnnnnnnnnnnnnnnnnnnnnnnnnnnnnnnnnnnnnnnnnnnnnnnnnnnnnnnnnnnnnnnnnnnnnnnnnnnnnnnnnnnnnnnnnnnnnnnnnnnnnnnnnnnnnnnnnnnnnnnnnnnnnnnnnnnnnnnnnnnnnnnnnnnnnnnnnnnnnnnnnnnnnnnnnnnnnnnnnnnnnnnnnnnnnnnnnnnnnnnnnnnnnnnnnnnnnnnnnnnnnnnnnnnnnnnnnnnnnnnnnnnnnnnnnnnnnnnnnnnnnnnnnnnnnnnnnnnnnnnnnnnnnnnnnnnnnnnnnnnnnnnnnnnnnnnnnnnnnnnnnnnnnnnnnnnnnnnnnnnnnnnnnnnnnnnnnnnnnnnnnnnnnnnnnnnnnnnnnnnnnnnnnnnnnnnnnnnnnnnnnnnnnnnnnnnnnnnnnnnnnnnnnnnnnnnnnnnnnnnnnnnnnnnnnnnnnnnnnnnnnnnnnnnnnnnnnnnnnnnnnnnnnnnnnnnnnnnnnnnnnnnnnnnnnnnnnnnnnnnnnnnnnnnnnnnnnnnnnnnnnnnnnnnnnnnnnnnnnnnnnnnnnnnnnnnnnnnnnnnnnnnnnnnnnnnnnnnnnnnnnnnnnnnnnnnnnnnnnnnnnnnnnnnnnnnnnnnnnnnnnnnnnnnnnnnnnnnnnnnnnnnnnnnnnnnnnnnnnnnnnnnnnnnnnnnnnnnnnnnnnnnnnnnnnnnnnnnnnnnnnnnnnnnnnnnnnnnnnnnnnnnnnnnnnnnnnnnnnnnnnnnnnnnnnnnnnnnnnnnnnnnnnnnnnnnnnnnnnnnnnnnnnnnnnnnnnnnnnnnnnnnnnnnnnnnnnnnnnnnnnnnnnnnnnnnnnnnnnnnnnnnnnnnnnnnnnnnnnnnnnnnnnnnnnnnnnnnnnnnnnnnnnnnnnnnnnnnnnnnnnnnnnnnnnnnnnnnnnnnnnnnnnnnnnnnnnnnnnnnnnnnnnnnnnnnnnnnnnnnnnnnnnnnnnnnnnnnnnnnnnnnnnnnnnnnnnnnnnnnnnnnnnnnnnnnnnnnnnnnnnnnnnnnnnnnnnnnnnnnnnnnnnnnnnnnnnnnnnnnnnnnnnnnnnnnnnnnnnnnnnnnnnnnnnnnnnnnnnnnnnnnnnnnnnnnnnnnnnnnnnnnnnnnnnnnnnnnnnnnnnnnnnnnnnnnnnnnnnnnnnnnnnnnnnnnnnnnnnnnnnnnnnnnnnnnnnnnnnnnnnnnnnnnnnnnnnnnnnnnnnnnnnnnnnnnnnnnnnnnnnnnnnnnnnnnnnnnnnnnnnnnnnnnnnnnnnnnnnnnnnnnnnnnnnnnnnnnnnnnnnnnnnnnnnnnnnnnnnnnnnnnnnnnnnnnnnnnnnnnnnnnnnnnnnnnnnnnnnnnnnnnnnnnnnnnnnnnnnnnnnnnnnnnnnnnnnnnnnnnnnnnnnnnnnnnnnnnnnnnnnnnnnnnnnnnnnnnnnnnnnnnnnnnnnnnnnnnnnnnnnnnnnnnnnnnnnnnnnnnnnnnnnnnnnnnnnnnnnnnnnnnnnnnnnnnnnnnnnnnnnnnnnnnnnnnnnnnnnnnnnnnnnnnnnnnnnnnnnnnnnnnnnnnnnnnnnnnnnnnnnnnnnnnnnnnnnnnnnnnnnnnnnnnnnnnnnnnnnnnnnnnnnnnnnnnnnnnnnnnnnnnnnnnnnnnnnnnnnnnnnnnnnnnnnnnnnnnnnnnnnnnnnnnnnnnnnnnnnnnnnnnnnnnnnnnnnnnnnnnnnnnnnnnnnnnnnnnnnnnnnnnnnnnnnnnnnnnnnnnnnnnnnnnnnnnnnnnnnnnnnnnnnnnnnnnnnnnnnnnnnnnnnnnnnnnnnnnnnnnnnnnnnnnnnnnnnnnnnnnnnnnnnnnnnnnnnnnnnnnnnnnnnnnnnnnnnnnnnnnnnnnnnnnnnnnnnnnnnnnnnnnnnnnnnnnnnnnnnnnnnnnnnnnnnnnnnnnnnnnnnnnnnnnnnnnnnnnnnnnnnnnnnnnnnnnnnnnnnnnnnnnnnnnnnnnnnnnnnnnnnnnnnnnnnnnnnnnnnnnnnnnnnnnnnnnnnnnnnnnnnnnnnnnnnnnnnnnnnnnnnnnnnnnnnnnnnnnnnnnnnnnnnnnnnnnnnnnnnnnnnnnnnnnnnnnnnnnnnnnnnnnnnnnnnnnnnnnnnnnnnnnnnnnnnnnnnnnnnnnnnnnnnnnnnnnnnnnnnnnnnnnnnnnnnnnnnnnnnnnnnnnnnnnnnnnnnnnnnnnnnnnnnnnnnnnnnnnnnnnnnnnnnnnnnnnnnnnnnnnnnnnnnnnnnnnnnnnnnnnnnnnnnnnnnnnnnnnnnnnnnnnnnnnnnnnnnnnnnnnnnnnnnnnnnnnnnnnnnnnnnnnnnnnnnnnnnnnnnnnnnnnnnnnnnnnnnnnnnnnnnnnnnnnnnnnnnnnnnnnnnnnnnnnnnnnnnnnnnnnnnnnnnnnnnnnnnnnnnnnnnnnnnnnnnnnnnnnnnnnnnnnnnnnnnnnnnnnnnnnnnnnnnnnnnnnnnnnnnnnnnnnnnnnnnnnnnnnnnnnnnnnnnnnnnnnnnnnnnnnnnnnnnnnnnnnnnnnnnnnnnnnnnnnnnnnnnnnnnnnnnnnnnnnnnnnnnnnnnnnnnnnnnnnnnnnnnnnnnnnnnnnnnnnnnnnnnnnnnnnnnnnnnnnnnnnnnnnnnnnnnnnnnnnnnnnnnnnnnnnnnnnnnnnnnnnnnnnnnnnnnnnnnnnnnnnnnnnnnnnnnnnnnnnnnnnnnnnnnnnnnnnnnnnnnnnnnnnnnnnnnnnnnnnnnnnnnnnnnnnnnnnnnnnnnnnnnnnnnnnnnnnnnnnnnnnnnnnnnnnnnnnnnnnnnnnnnnnnnnnnnnnnnnnnnnnnnnnnnnnnnnnnnnnnnnnnnnnnnnnnnnnnnnnnnnnnnnnnnnnnnnnnnnnnnnnnnnnnnnnnnnnnnnnnnnnnnnnnnnnnnnnnnnnnnnnnnnnnnnnnnnnnnnnnnnnnnnnnnnnnnnnnnnnnnnnnnnnnnnnnnnnnnnnnnnnnnnnnnnnnnnnnnnnnnnnnnnnnnnnnnnnnnnnnnnnnnnnnnnnnnnnnnnnnnnnnnnnnnnnnnnnnnnnnnnnnnnnnnnnnnnnnnnnnnnnnnnnnnnnnnnnnnnnnnnnnnnnnnnnnnnnnnnnnnnnnnnnnnnnnnnnnnnnnnnnnnnnnnnnnnnnnnnnnnnnnnnnnnnnnnnnnnnnnnnnnnnnnnnnnnnnnnnnnnnnnnnnnnnnnnnnnnnnnnnnnnnnnnnnnnnnnnnnnnnnnnnnnnnnnnnnnnnnnnnnnnnnnnnnnnnnnnnnnnnnnnnnnnnnnnnnnnnnnnnnnnnnnnnnnnnnnnnnnnnnnnnnnnnnnnnnnnnnnnnnnnnnnnnnnnnnnnnnnnnnnnnnnnnnnnnnnnnnnnnnnnnnnnnnnnnnnnnnnnnnnnnnnnnnnnnnnnnnnnnnnnnnnnnnnnnnnnnnnnnnnnnnnnnnnnnnnnnnnnnnnnnnnnnnnnnnnnnnnnnnnnnnnnnnnnnnnnnnnnnnnnnnnnnnnnnnnnnnnnnnnnnnnnnnnnnnnnnnnnnnnnnnnnnnnnnnnnnnnnnnnnnnnnnnnnnnnnnnnnnnnnnnnnnnnnnnnnnnnnnnnnnnnnnnnnnnnnnnnnnnnnnnnnnnnnnnnnnnnnnnnnnnnnnnnnnnnnnnnnnnnnnnnnnnnnnnnnnnnnnnnnnnnnnnnnnnnnnnnnnnnnnnnnnnnnnnnnnnnnnnnnnnnnnnnnnnnnnnnnnnnnnnnnnnnnnnnnnnnnnnnnnnnnnnnnnnnnnnnnnnnnnnnnnnnnnnnnnnnnnnnnnnnnnnnnnnnnnnnnnnnnnnnnnnnnnnnnnnnnnnnnnnnnnnnnnnnnnnnnnnnnnnnnnnnnnnnnnnnnnnnnnnnnnnnnnnnnnnnnnnnnnnnnnnnnnnnnnnnnnnnnnnnnnnnnnnnnnnnnnnnnnnnnnnnnnnnnnnnnnnnnnnnnnnnnnnnnnnnnnnnnnnnnnnnnnnnnnnnnnnnnnnnnnnnnnnnnnnnnnnnnnnnnnnnnnnnnnnnnnnnnnnnnnnnnnnnnnnnnnnnnnnnnnnnnnnnnnnnnnnnnnnnnnnnnnnnnnnnnnnnnnnnnnnnnnnnnnnnnnnnnnnnnnnnnnnnnnnnnnnnnnnnnnnnnnnnnnnnnnnnnnnnnnnnnnnnnnnnnnnnnnnnnnnnnnnnnnnnnnnnnnnnnnnnnnnnnnnnnnnnnnnnnnnnnnnnnnnnnnnnnnnnnnnnnnnnnnnnnnnnnnnnnnnnnnnnnnnnnnnnnnnnnnnnnnnnnnnnnnnnnnnnnnnnnnnnnnnnnnnnnnnnnnnnnnnnnnnnnnnnnnnnnnnnnnnnnnnnnnnnnnnnnnnnnnnnnnnnnnnnnnnnnnnnnnnnnnnnnnnnnnnnnnnnnnnnnnnnnnnnnnnnnnnnnnnnnnnnnnnnnnnnnnnnnnnnnnnnnnnnnnnnnnnnnnnnnnnnnnnnnnnnnnnnnnnnnnnnnnnnnnnnnnnnnnnnnnnnnnnnnnnnnnnnnnnnnnnnnnnnnnnnnnnnnnnnnnnnnnnnnnnnnnnnnnnnnnnnnnnnnnnnnnnnnnnnnnnnnnnnnnnnnnnnnnnnnnnnnnnnnnnnnnnnnnnnnnnnnnnnnnnnnnnnnnnnnnnnnnnnnnnnnnnnnnnnnnnnnnnnnnnnnnnnnnnnnnnnnnnnnnnnnnnnnnnnnnnnnnnnnnnnnnnnnnnnnnnnnnnnnnnnnnnnnnnnnnnnnnnnnnnnnnnnnnnnnnnnnnnnnnnnnnnnnnnnnnnnnnnnnnnnnnnnnnnnnnnnnnnnnnnnnnnnnnnnnnnnnnnnnnnnnnnnnnnnnnnnnnnnnnnnnnnnnnnnnnnnnnnnnnnnnnnnnnnnnnnnnnnnnnnnnnnnnnnnnnnnnnnnnnnnnnnnnnnnnnnnnnnnnnnnnnnnnnnnnnnnnnnnnnnnnnnnnnnnnnnnnnnnnnnnnnnnnnnnnnnnnnnnnnnnnnnnnnnnnnnnnnnnnnnnnnnnnnnnnnnnnnnnnnnnnnnnnnnnnnnnnnnnnnnnnnnnnnnnnnnnnnnnnnnnnnnnnnnnnnnnnnnnnnnnnnnnnnnnnnnnnnnnnnnnnnnnnnnnnnnnnnnnnnnnnnnnnnnnnnnnnnnnnnnnnnnnnnnnnnnnnnnnnnnnnnnnnnnnnnnnnnnnnnnnnnnnnnnnnnnnnnnnnnnnnnnnnnnnnnnnnnnnnnnnnnnnnnnnnnnnnnnnnnnnnnnnnnnnnnnnnnnnnnnnnnnnnnnnnnnnnnnnnnnnnnnnnnnnnnnnnnnnnnnnnnnnnnnnnnnnnnnnnnnnnnnnnnnnnnnnnnnnnnnnnnnnnnnnnnnnnnnnnnnnnnnnnnnnnnnnnnnnnnnnnnnnnnnnnnnnnnnnnnnnnnnnnnnnnnnnnnnnnnnnnnnnnnnnnnnnnnnnnnnnnnnnnnnnnnnnnnnnnnnnnnnnnnnnnnnnnnnnnnnnnnnnnnnnnnnnnnnnnnnnnnnnnnnnnnnnnnnnnnnnnnnnnnnnnnnnnnnnnnnnnnnnnnnnnnnnnnnnnnnnnnnnnnnnnnnnnnnnnnnnnnnnnnnnnnnnnnnnnnnnnnnnnnnnnnnnnnnnnnnnnnnnnnnnnnnnnnnnnnnnnnnnnnnnnnnnnnnnnnnnnnnnnnnnnnnnnnnnnnnnnnnnnnnnnnnnnnnnnnnnnnnnnnnnnnnnnnnnnnnnnnnnnnnnnnnnnnnnnnnnnnnnnnnnnnnnnnnnnnnnnnnnnnnnnnnnnnnnnnnnnnnnnnnnnnnnnnnnnnnnnnnnnnnnnnnnnnnnnnnnnnnnnnnnnnnnnnnnnnnnnnnnnnnnnnnnnnnnnnnnnnnnnnnnnnnnnnnnnnnnnnnnnnnnnnnnnnnnnnnnnnnnnnnnnnnnnnnnnnnnnnnnnnnnnnnnnnnnnnnnnnnnnnnnnnnnnnnnnnnnnnnnnnnnnnnnnnnnnnnnnnnnnnnnnnnnnnnnnnnnnnnnnnnnnnnnnnnnnnnnnnnnnnnnnnnnnnnnnnnnnnnnnnnnnnnnnnnnnnnnnnnnnnnnnnnnnnnnnnnnnnnnnnnnnnnnnnnnnnnnnnnnnnnnnnnnnnnnnnnnnnnnnnnnnnnnnnnnnnnnnnnnnnnnnnnnnnnnnnnnnnnnnnnnnnnnnnnnnnnnnnnnnnnnnnnnnnnnnnnnnnnnnnnnnnnnnnnnnnnnnnnnnnnnnnnnnnnnnnnnnnnnnnnnnnnnnnnnnnnnnnnnnnnnnnnnnnnnnnnnnnnnnnnnnnnnnnnnnnnnnnnnnnnnnnnnnnnnnnnnnnnnnnnnnnnnnnnnnnnnnnnnnnnnnnnnnnnnnnnnnnnnnnnnnnnnnnnnnnnnnnnnnnnnnnnnnnnnnnnnnnnnnnnnnnnnnnnnnnnnnnnnnnnnnnnnnnnnnnnnnnnnnnnnnnnnnnnnnnnnnnnnnnnnnnnnnnnnnnnnnnnnnnnnnnnnnnnnnnnnnnnnnnnnnnnnnnnnnnnnnnnnnnnnnnnnnnnnnnnnnnnnnnnnnnnnnnnnnnnnnnnnnnnnnnnnnnnnnnnnnnnnnnnnnnnnnnnnnnnnnnnnnnnnnnnnnnnnnnnnnnnnnnnnnnnnnnnnnnnnnnnnnnnnnnnnnnnnnnnnnnnnnnnnnnnnnnnnnnnnnnnnnnnnnnnnnnnnnnnnnnnnnnnnnnnnnnnnnnnnnnnnnnnnnnnnnnnnnnnnnnnnnnnnnnnnnnnnnnnnnnnnnnnnnnnnnnnnnnnnnnnnnnnnnnnnnnnnnnnnnnnnnnnnnnnnnnnnnnnnnnnnnnnnnnnnnnnnnnnnnnnnnnnnnnnnnnnnnnnnnnnnnnnnnnnnnnnnnnnnnnnnnnnnnnnnnnnnnnnnnnnnnnnnnnnnnnnnnnnnnnnnnnnnnnnnnnnnnnnnnnnnnnnnnnnnnnnnnnnnnnnnnnnnnnnnnnnnnnnnnnnnnnnnnnnnnnnnnnnnnnnnnnnnnnnnnnnnnnnnnnnnnnnnnnnnnnnnnnnnnnnnnnnnnnnnnnnnnnnnnnnnnnnnnnnnnnnnnnnnnnnnnnnnnnnnnnnnnnnnnnnnnnnnnnnnnnnnnnnnnnnnnnnnnnnnnnnnnnnnnnnnnnnnnnnnnnnnnnnnnnnnnnnnnnnnnnnnnnnnnnnnnnnnnnnnnnnnnnnnnnnnnnnnnnnnnnnnnnnnnnnnnnnnnnnnnnnnnnnnnnnnnnnnnnnnnnnnnnnnnnnnnnnnnnnnnnnnnnnnnnnnnnnnnnnnnnnnnnnnnnnnnnnnnnnnnnnnnnnnnnnnnnnnnnnnnnnnnnnnnnnnnnnnnnnnnnnnnnnnnnnnnnnnnnnnnnnnnnnnnnnnnnnnnnnnnnnnnnnnnnnnnnnnnnnnnnnnnnnnnnnnnnnnnnnnnnnnnnnnnnnnnnnnnnnnnnnnnnnnnnnnnnnnnnnnnnnnnnnnnnnnnnnnnnnnnnnnnnnnnnnnnnnnnnnnnnnnnnnnnnnnnnnnnnnnnnnnnnnnnnnnnnnnnnnnnnnnnnnnnnnnnnnnnnnnnnnnnnnnnnnnnnnnnnnnnnnnnnnnnnnnnnnnnnnnnnnnnnnnnnnnnnnnnnnnnnnnnnnnnnnnnnnnnnnnnnnnnnnnnnnnnnnnnnnnnnnnnnnnnnnnnnnnnnnnnnnnnnnnnnnnnnnnnnnnnnnnnnnnnnnnnnnnnnnnnnnnnnnnnnnnnnnnnnnnnnnnnnnnnnnnnnnnnnnnnnnnnnnnnnnnnnnnnnnnnnnnnnnnnnnnnnnnnnnnnnnnnnnnnnnnnnnnnnnnnnnnnnnnnnnnnnnnnnnnnnnnnnnnnnnnnnnnnnnnnnnnnnnnnnnnnnnnnnnnnnnnnnnnnnnnnnnnnnnnnnnnnnnnnnnnnnnnnnnnnnnnnnnnnnnnnnnnnnnnnnnnnnnnnnnnnnnnnnnnnnnnnnnnnnnnnnnnnnnnnnnnnnnnnnnnnnnnnnnnnnnnnnnnnnnnnnnnnnnnnnnnnnnnnnnnnnnnnnnnnnnnnnnnnnnnnnnnnnnnnnnnnnnnnnnnnnnnnnnnnnnnnnnnnnnnnnnnnnnnnnnnnnnnnnnnnnnnnnnnnnnnnnnnnnnnnnnnnnnnnnnnnnnnnnnnnnnnnnnnnnnnnnnnnnnnnnnnnnnnnnnnnnnnnnnnnnnnnnnnnnnnnnnnnnnnnnnnnnnnnnnnnnnnnnnnnnnnnnnnnnnnnnnnnnnnnnnnnnnnnnnnnnnnnnnnnnnnnnnnnnnnnnnnnnnnnnnnnnnnnnnnnnnnnnnnnnnnnnnnnnnnnnnnnnnnnnnnnnnnnnnnnnnnnnnnnnnnnnnnnnnnnnnnnnnnnnnnnnnnnnnnnnnnnnnnnnnnnnnnnnnnnnnnnnnnnnnnnnnnnnnnnnnnnnnnnnnnnnnnnnnnnnnnnnnnnnnnnnnnnnnnnnnnnnnnnnnnnnnnnnnnnnnnnnnnnnnnnnnnnnnnnnnnnnnnnnnnnnnnnnnnnnnnnnnnnnnnnnnnnnnnnnnnnnnnnnnnnnnnnnnnnnnnnnnnnnnnnnnnnnnnnnnnnnnnnnnnnnnnnnnnnnnnnnnnnnnnnnnnnnnnnnnnnnnnnnnnnnnnnnnnnnnnnnnnnnnnnnnnnnnnnnnnnnnnnnnnnnnnnnnnnnnnnnnnnnnnnnnnnnnnnnnnnnnnnnnnnnnnnnnnnnnnnnnnnnnnnnnnnnnnnnnnnnnnnnnnnnnnnnnnnnnnnnnnnnnnnnnnnnnnnnnnnnnnnnnnnnnnnnnnnnnnnnnnnnnnnnnnnnnnnnnnnnnnnnnnnnnnnnnnnnnnnnnnnnnnnnnnnnnnnnnnnnnnnnnnnnnnnnnnnnnnnnnnnnnnnnnnnnnnnnnnnnnnnnnnnnnnnnnnnnnnnnnnnnnnnnnnnnnnnnnnnnnnnnnnnnnnnnnnnnnnnnnnnnnnnnnnnnnnnnnnnnnnnnnnnnnnnnnnnnnnnnnnnnnnnnnnnnnnnnnnnnnnnnnnnnnnnnnnnnnnnnnnnnnnnnnnnnnnnnnnnnnnnnnnnnnnnnnnnnnnnnnnnnnnnnnnnnnnnnnnnnnnnnnnnnnnnnnnnnnnnnnnnnnnnnnnnnnnnnnnnnnnnnnnnnnnnnnnnnnnnnnnnnnnnnnnnnnnnnnnnnnnnnnnnnnnnnnnnnnnnnnnnnnnnnnnnnnnnnnnnnnnnnnnnnnnnnnnnnnnnnnnnnnnnnnnnnnnnnnnnnnnnnnnnnnnnnnnnnnnnnnnnnnnnnnnnnnnnnnnnnnnnnnnnnnnnnnnnnnnnnnnnnnnnnnnnnnnnnnnnnnnnnnnnnnnnnnnnnnnnnnnnnnnnnnnnnnnnnnnnnnnnnnnnnnnnnnnnnnnnnnnnnnnnnnnnnnnnnnnnnnnnnnnnnnnnnnnnnnnnnnnnnnnnnnnnnnnnnnnnnnnnnnnnnnnnnnnnnnnnnnnnnnnnnnnnnnnnnnnnnnnnnnnnnnnnnnnnnnnnnnnnnnnnnnnnnnnnnnnnnnnnnnnnnnnnnnnnnnnnnnnnnnnnnnnnnnnnnnnnnnnnnnnnnnnnnnnnnnnnnnnnnnnnnnnnnnnnnnnnnnnnnnnnnnnnnnnnnnnnnnnnnnnnnnnnnnnnnnnnnnnnnnnnnnnnnnnnnnnnnnnnnnnnnnnnnnnnnnnnnnnnnnnnnnnnnnnnnnnnnnnnnnnnnnnnnnnnnnnnnnnnnnnnnnnnnnnnnnnnnnnnnnnnnnnnnnnnnnnnnnnnnnnnnnnnnnnnnnnnnnnnnnnnnnnnnnnnnnnnnnnnnnnnnnnnnnnnnnnnnnnnnnnnnnnnnnnnnnnnnnnnnnnnnnnnnnnnnnnnnnnnnnnnnnnnnnnnnnnnnnnnnnnnnnnnnnnnnnnnnnnnnnnnnnnnnnnnnnnnnnnnnnnnnnnnnnnnnnnnnnnnnnnnnnnnnnnnnnnnnnnnnnnnnnnnnnnnnnnnnnnnnnnnnnnnnnnnnnnnnnnnnnnnnnnnnnnnnnnnnnnnnnnnnnnnnnnnnnnnnnnnnnnnnnnnnnnnnnnnnnnnnnnnnnnnnnnnnnnnnnnnnnnnnnnnnnnnnnnnnnnnnnnnnnnnnnnnnnnnnnnnnnnnnnnnnnnnnnnnnnnnnnnnnnnnnnnnnnnnnnnnnnnnnnnnnnnnnnnnnnnnnnnnnnnnnnnnnnnnnnnnnnnnnnnnnnnnnnnnnnnnnnnnnnnnnnnnnnnnnnnnnnnnnnnnnnnnnnnnnnnnnnnnnnnnnnnnnnnnnnnnnnnnnnnnnnnnnnnnnnnnnnnnnnnnnnnnnnnnnnnnnnnnnnnnnnnnnnnnnnnnnnnnnnnnnnnnnnnnnnnnnnnnnnnnnnnnnnnnnnnnnnnnnnnnnnnnnnnnnnnnnnnnnnnnnnnnnnnnnnnnnnnnnnnnnnnnnnnnnnnnnnnnnnnnnnnnnnnnnnnnnnnnnnnnnnnnnnnnnnnnnnnnnnnnnnnnnnnnnnnnnnnnnnnnnnnnnnnnnnnnnnnnnnnnnnnnnnnnnnnnnnnnnnnnnnnnnnnnnnnnnnnnnnnnnnnnnnnnnnnnnnnnnnnnnnnnnnnnnnnnnnnnnnnnnnnnnnnnnnnnnnnnnnnnnnnnnnnnnnnnnnnnnnnnnnnnnnnnnnnnnnnnnnnnnnnnnnnnnnnnnnnnnnnnnnnnnnnnnnnnnnnnnnnnnnnnnnnnnnnnnnnnnnnnnnnnnnnnnnnnnnnnnnnnnnnnnnnnnnnnnnnnnnnnnnnnnnnnnnnnnnnnnnnnnnnnnnnnnnnnnnnnnnnnnnnnnnnnnnnnnnnnnnnnnnnnnnnnnnnnnnnnnnnnnnnnnnnnnnnnnnnnnnnnnnnnnnnnnnnnnnnnnnnnnnnnnnnnnnnnnnnnnnnnnnnnnnnnnnnnnnnnnnnnnnnnnnnnnnnnnnnnnnnnnnnnnnnnnnnnnnnnnnnnnnnnnnnnnnnnnnnnnnnnnnnnnnnnnnnnnnnnnnnnnnnnnnnnnnnnnnnnnnnnnnnnnnnnnnnnnnnnnnnnnnnnnnnnnnnnnnnnnnnnnnnnnnnnnnnnnnnnnnnnnnnnnnnnnnnnnnnnnnnnnnnnnnnnnnnnnnnnnnnnnnnnnnnnnnnnnnnnnnnnnnnnnnnnnnnnnnnnnnnnnnnnnnnnnnnnnnnnnnnnnnnnnnnnnnnnnnnnnnnnnnnnnnnnnnnnnnnnnnnnnnnnnnnnnnnnnnnnnnnnnnnnnnnnnnnnnnnnnnnnnnnnnnnnnnnnnnnnnnnnnnnnnnnnnnnnnnnnnnnnnnnnnnnnnnnnnnnnnnnnnnnnnnnnnnnnnnnnnnnnnnnnnnnnnnnnnnnnnnnnnnnnnnnnnnnnnnnnnnnnnnnnnnnnnnnnnnnnnnnnnnnnnnnnnnnnnnnnnnnnnnnnnnnnnnnnnnnnnnnnnnnnnnnnnnnnnnnnnnnnnnnnnnnnnnnnnnnnnnnnnnnnnnnnnnnnnnnnnnnnnnnnnnnnnnnnnnnnnnnnnnnnnnnnnnnnnnnnnnnnnnnnnnnnnnnnnnnnnnnnnnnnnnnnnnnnnnnnnnnnnnnnnnnnnnnnnnnnnnnnnnnnnnnnnnnnnnnnnnnnnnnnnnnnnnnnnnnnnnnnnnnnnnnnnnnnnnnnnnnnnnnnnnnnnnnnnnnnnnnnnnnnnnnnnnnnnnnnnnnnnnnnnnnnnnnnnnnnnnnnnnnnnnnnnnnnnnnnnnnnnnnnnnnnnnnnnnnnnnnnnnnnnnnnnnnnnnnnnnnnnnnnnnnnnnnnnnnnnnnnnnnnnnnnnnnnnnnnnnnnnnnnnnnnnnnnnnnnnnnnnnnnnnnnnnnnnnnnnnnnnnnnnnnnnnnnnnnnnnnnnnnnnnnnnnnnnnnnnnnnnnnnnnnnnnnnnnnnnnnnnnnnnnnnnnnnnnnnnnnnnnnnnnnnnnnnnnnnnnnnnnnnnnnnnnnnnnnnnnnnnnnnnnnnnnnnnnnnnnnnnnnnnnnnnnnnnnnnnnnnnnnnnnnnnnnnnnnnnnnnnnnnnnnnnnnnnnnnnnnnnnnnnnnnnnnnnnnnnnnnnnnnnnnnnnnnnnnnnnnnnnnnnnnnnnnnnnnnnnnnnnnnnnnnnnnnnnnnnnnnnnnnnnnnnnnnnnnnnnnnnnnnnnnnnnnnnnnnnnnnnnnnnnnnnnnnnnnnnnnnnnnnnnnnnnnnnnnnnnnnnnnnnnnnnnnnnnnnnnnnnnnnnnnnnnnnnnnnnnnnnnnnnnnnnnnnnnnnnnnnnnnnnnnnnnnnnnnnnnnnnnnnnnnnnnnnnnnnnnnnnnnnnnnnnnnnnnnnnnnnnnnnnnnnnnnnnnnnnnnnnnnnnnnnnnnnnnnnnnnnnnnnnnnnnnnnnnnnnnnnnnnnnnnnnnnnnnnnnnnnnnnnnnnnnnnnnnnnnnnnnnnnnnnnnnnnnnnnnnnnnnnnnnnnnnnnnnnnnnnnnnnnnnnnnnnnnnnnnnnnnnnnnnnnnnnnnnnnnnnnnnnnnnnnnnnnnnnnnnnnnnnnnnnnnnnnnnnnnnnnnnnnnnnnnnnnnnnnnnnnnnnnnnnnnnnnnnnnnnnnnnnnnnnnnnnnnnnnnnnnnnnnnnnnnnnnnnnnnnnnnnnnnnnnnnnnnnnnnnnnnnnnnnnnnnnnnnnnnnnnnnnnnnnnnnnnnnnnnnnnnnnnnnnnnnnnnnnnnnnnnnnnnnnnnnnnnnnnnnnnnnnnnnnnnnnnnnnnnnnnnnnnnnnnnnnnnnnnnnnnnnnnnnnnnnnnnnnnnnnnnnnnnnnnnnnnnnnnnnnnnnnnnnnnnnnnnnnnnnnnnnnnnnnnnnnnnnnnnnnnnnnnnnnnnnnnnnnnnnnnnnnnnnnnnnnnnnnnnnnnnnnnnnnnnnnnnnnnnnnnnnnnnnnnnnnnnnnnnnnnnnnnnnnnnnnnnnnnnnnnnnnnnnnnnnnnnnnnnnnnnnnnnnnnnnnnnnnnnnnnnnnnnnnnnnnnnnnnnnnnnnnnnnnnnnnnnnnnnnnnnnnnnnnnnnnnnnnnnnnnnnnnnnnnnnnnnnnnnnnnnnnnnnnnnnnnnnnnnnnnnnnnnnnnnnnnnnnnnnnnnnnnnnnnnnnnnnnnnnnnnnnnnnnnnnnnnnnnnnnnnnnnnnnnnnnnnnnnnnnnnnnnnnnnnnnnnnnnnnnnnnnnnnnnnnnnnnnnnnnnnnnnnnnnnnnnnnnnnnnnnnnnnnnnnnnnnnnnnnnnnnnnnnnnnnnnnnnnnnnnnnnnnnnnnnnnnnnnnnnnnnnnnnnnnnnnnnnnnnnnnnnnnnnnnnnnnnnnnnnnnnnnnnnnnnnnnnnnnnnnnnnnnnnnnnnnnnnnnnnnnnnnnnnnnnnnnnnnnnnnnnnnnnnnnnnnnnnnnnnnnnnnnnnnnnnnnnnnnnnnnnnnnnnnnnnnnnnnnnnnnnnnnnnnnnnnnnnnnnnnnnnnnnnnnnnnnnnnnnnnnnnnnnnnnnnnnnnnnnnnnnnnnnnnnnnnnnnnnnnnnnnnnnnnnnnnnnnnnnnnnnnnnnnnnnnnnnnnnnnnnnnnnnnnnnnnnnnnnnnnnnnnnnnnnnnnnnnnnnnnnnnnnnnnnnnnnnnnnnnnnnnnnnnnnnnnnnnnnnnnnnnnnnnnnnnnnnnnnnnnnnnnnnnnnnnnnnnnnnnnnnnnnnnnnnnnnnnnnnnnnnnnnnnnnnnnnnnnnnnnnnnnnnnnnnnnnnnnnnnnnnnnnnnnnnnnnnnnnnnnnnnnnnnnnnnnnnnnnnnnnnnnnnnnnnnnnnnnnnnnnnnnnnnnnnnnnnnnnnnnnnnnnnnnnnnnnnnnnnnnnnnnnnnnnnnnnnnnnnnnnnnnnnnnnnnnnnnnnnnnnnnnnnnnnnnnnnnnnnnnnnnnnnnnnnnnnnnnnnnnnnnnnnnnnnnnnnnnnnnnnnnnnnnnnnnnnnnnnnnnnnnnnnnnnnnnnnnnnnnnnnnnnnnnnnnnnnnnnnnnnnnnnnnnnnnnnnnnnnnnnnnnnnnnnnnnnnnnnnnnnnnnnnnnnnnnnnnnnnnnnnnnnnnnnnnnnnnnnnnnnnnnnnnnnnnnnnnnnnnnnnnnnnnnnnnnnnnnnnnnnnnnnnnnnnnnnnnnnnnnnnnnnnnnnnnnnnnnnnnnnnnnnnnnnnnnnnnnnnnnnnnnnnnnnnnnnnnnnnnnnnnnnnnnnnnnnnnnnnnnnnnnnnnnnnnnnnnnnnnnnnnnnnnnnnnnnnnnnnnnnnnnnnnnnnnnnnnnnnnnnnnnnnnnnnnnnnnnnnnnnnnnnnnnnnnnnnnnnnnnnnnnnnnnnnnnnnnnnnnnnnnnnnnnnnnnnnnnnnnnnnnnnnnnnnnnnnnnnnnnnnnnnnnnnnnnnnnnnnnnnnnnnnnnnnnnnnnnnnnnnnnnnnnnnnnnnnnnnnnnnnnnnnnnnnnnnnnnnnnnnnnnnnnnnnnnnnnnnnnnnnnnnnnnnnnnnnnnnnnnnnnnnnnnnnnnnnnnnnnnnnnnnnnnnnnnnnnnnnnnnnnnnnnnnnnnnnnnnnnnnnnnnnnnnnnnnnnnnnnnnnnnnnnnnnnnnnnnnnnnnnnnnnnnnnnnnnnnnnnnnnnnnnnnnnnnnnnnnnnnnnnnnnnnnnnnnnnnnnnnnnnnnnnnnnnnnnnnnnnnnnnnnnnnnnnnnnnnnnnnnnnnnnnnnnnnnnnnnnnnnnnnnnnnnnnnnnnnnnnnnnnnnnnnnnnnnnnnnnnnnnnnnnnnnnnnnnnnnnnnnnnnnnnnnnnnnnnnnnnnnnnnnnnnnnnnnnnnnnnnnnnnnnnnnnnnnnnnnnnnnnnnnnnnnnnnnnnnnnnnnnnnnnnnnnnnnnnnnnnnnnnnnnnnnnnnnnnnnnnnnnnnnnnnnnnnnnnnnnnnnnnnnnnnnnnnnnnnnnnnnnnnnnnnnnnnnnnnnnnnnnnnnnnnnnnnnnnnnnnnnnnnnnnnnnnnnnnnnnnnnnnnnnnnnnnnnnnnnnnnnnnnnnnnnnnnnnnnnnnnnnnnnnnnnnnnnnnnnnnnnnnnnnnnnnnnnnnnnnnnnnnnnnnnnnnnnnnnnnnnnnnnnnnnnnnnnnnnnnnnnnnnnnnnnnnnnnnnnnnnnnnnnnnnnnnnnnnnnnnnnnnnnnnnnnnnnnnnnnnnnnnnnnnnnnnnnnnnnnnnnnnnnnnnnnnnnnnnnnnnnnnnnnnnnnnnnnnnnnnnnnnnnnnnnnnnnnnnnnnnnnnnnnnnnnnnnnnnnnnnnnnnnnnnnnnnnnnnnnnnnnnnnnnnnnnnnnnnnnnnnnnnnnnnnnnnnnnnnnnnnnnnnnnnnnnnnnnnnnnnnnnnnnnnnnnnnnnnnnnnnnnnnnnnnnnnnnnnnnnnnnnnnnnnnnnnnnnnnnnnnnnnnnnnnnnnnnnnnnnnnnnnnnnnnnnnnnnnnnnnnnnnnnnnnnnnnnnnnnnnnnnnnnnnnnnnnnnnnnnnnnnnnnnnnnnnnnnnnnnnnnnnnnnnnnnnnnnnnnnnnnnnnnnnnnnnnnnnnnnnnnnnnnnnnnnnnnnnnnnnnnnnnnnnnnnnnnnnnnnnnnnnnnnnnnnnnnnnnnnnnnnnnnnnnnnnnnnnnnnnnnnnnnnnnnnnnnnnnnnnnnnnnnnnnnnnnnnnnnnnnnnnnnnnnnnnnnnnnnnnnnnnnnnnnnnnnnnnnnnnnnnnnnnnnnnnnnnnnnnnnnnnnnnnnnnnnnnnnnnnnnnnnnnnnnnnnnnnnnnnnnnnnnnnnnnnnnnnnnnnnnnnnnnnnnnnnnnnnnnnnnnnnnnnnnnnnnnnnnnnnnnnnnnnnnnnnnnnnnnnnnnnnnnnnnnnnnnnnnnnnnnnnnnnnnnnnnnnnnnnnnnnnnnnnnnnnnnnnnnnnnnnnnnnnnnnnnnnnnnnnnnnnnnnnnnnnnnnnnnnnnnnnnnnnnnnnnnnnnnnnnnnnnnnnnnnnnnnnnnnnnnnnnnnnnnnnnnnnnnnnnnnnnnnnnnnnnnnnnnnnnnnnnnnnnnnnnnnnnnnnnnnnnnnnnnnnnnnnnnnnnnnnnnnnnnnnnnnnnnnnnnnnnnnnnnnnnnnnnnnnnnnnnnnnnnnnnnnnnnnnnnnnnnnnnnnnnnnnnnnnnnnnnnnnnnnnnnnnnnnnnnnnnnnnnnnnnnnnnnnnnnnnnnnnnnnnnnnnnnnnnnnnnnnnnnnnnnnnnnnnnnnnnnnnnnnnnnnnnnnnnnnnnnnnnnnnnnnnnnnnnnnnnnnnnnnnnnnnnnnnnnnnnnnnnnnnnnnnnnnnnnnnnnnnnnnnnnnnnnnnnnnnnnnnnnnnnnnnnnnnnnnnnnnnnnnnnnnnnnnnnnnnnnnnnnnnnnnnnnnnnnnnnnnnnnnnnnnnnnnnnnnnnnnnnnnnnnnnnnnnnnnnnnnnnnnnnnnnnnnnnnnnnnnnnnnnnnnnnnnnnnnnnnnnnnnnnnnnnnnnnnnnnnnnnnnnnnnnnnnnnnnnnnnnnnnnnnnnnnnnnnnnnnnnnnnnnnnnnnnnnnnnnnnnnnnnnnnnnnnnnnnnnnnnnnnnnnnnnnnnnnnnnnnnnnnnnnnnnnnnnnnnnnnnnnnnnnnnnnnnnnnnnnnnnnnnnnnnnnnnnnnnnnnnnnnnnnnnnnnnnnnnnnnnnnnnnnnnnnnnnnnnnnnnnnnnnnnnnnnnnnnnnnnnnnnnnnnnnnnnnnnnnnnnnnnnnnnnnnnnnnnnnnnnnnnnnnnnnnnnnnnnnnnnnnnnnnnnnnnnnnnnnnnnnnnnnnnnnnnnnnnnnnnnnnnnnnnnnnnnnnnnnnnnnnnnnnnnnnnnnnnnnnnnnnnnnnnnnnnnnnnnnnnnnnnnnnnnnnnnnnnnnnnnnnnnnnnnnnnnnnnnnnnnnnnnnnnnnnnnnnnnnnnnnnnnnnnnnnnnnnnnnnnnnnnnnnnnnnnnnnnnnnnnnnnnnnnnnnnnnnnnnnnnnnnnnnnnnnnnnnnnnnnnnnnnnnnnnnnnnnnnnnnnnnnnnnnnnnnnnnnnnnnnnnnnnnnnnnnnnnnnnnnnnnnnnnnnnnnnnnnnnnnnnnnnnnnnnnnnnnnnnnnnnnnnnnnnnnnnnnnnnnnnnnnnnnnnnnnnnnnnnnnnnnnnnnnnnnnnnnnnnnnnnnnnnnnnnnnnnnnnnnnnnnnnnnnnnnnnnnnnnnnnnnnnnnnnnnnnnnnnnnnnnnnnnnnnnnnnnnnnnnnnnnnnnnnnnnnnnnnnnnnnnnnnnnnnnnnnnnnnnnnnnnnnnnnnnnnnnnnnnnnnnnnnnnnnnnnnnnnnnnnnnnnnnnnnnnnnnnnnnnnnnnnnnnnnnnnnnnnnnnnnnnnnnnnnnnnnnnnnnnnnnnnnnnnnnnnnnnnnnnnnnnnnnnnnnnnnnnnnnnnnnnnnnnnnnnnnnnnnnnnnnnnnnnnnnnnnnnnnnnnnnnnnnnnnnnnnnnnnnnnnnnnnnnnnnnnnnnnnnnnnnnnnnnnnnnnnnnnnnnnnnnnnnnnnnnnnnnnnnnnnnnnnnnnnnnnnnnnnnnnnnnnnnnnnnnnnnnnnnnnnnnnnnnnnnnnnnnnnnnnnnnnnnnnnnnnnnnnnnnnnnnnnnnnnnnnnnnnnnnnnnnnnnnnnnnnnnnnnnnnnnnnnnnnnnnnnnnnnnnnnnnnnnnnnnnnnnnnnnnnnnnnnnnnnnnnnnnnnnnnnnnnnnnnnnnnnnnnnnnnnnnnnnnnnnnnnnnnnnnnnnnnnnnnnnnnnnnnnnnnnnnnnnnnnnnnnnnnnnnnnnnnnnnnnnnnnnnnnnnnnnnnnnnnnnnnnnnnnnnnnnnnnnnnnnnnnnnnnnnnnnnnnnnnnnnnnnnnnnnnnnnnnnnnnnnnnnnnnnnnnnnnnnnnnnnnnnnnnnnnnnnnnnnnnnnnnnnnnnnnnnnnnnnnnnnnnnnnnnnnnnnnnnnnnnnnnnnnnnnnnnnnnnnnnnnnnnnnnnnnnnnnnnnnnnnnnnnnnnnnnnnnnnnnnnnnnnnnnnnnnnnnnnnnnnnnnnnnnnnnnnnnnnnnnnnnnnnnnnnnnnnnnnnnnnnnnnnnnnnnnnnnnnnnnnnnnnnnnnnnnnnnnnnnnnnnnnnnnnnnnnnnnnnnnnnnnnnnnnnnnnnnnnnnnnnnnnnnnnnnnnnnnnnnnnnnnnnnnnnnnnnnnnnnnnnnnnnnnnnnnnnnnnnnnnnnnnnnnnnnnnnnnnnnnnnnnnnnnnnnnnnnnnnnnnnnnnnnnnnnnnnnnnnnnnnnnnnnnnnnnnnnnnnnnnnnnnnnnnnnnnnnnnnnnnnnnnnnnnnnnnnnnnnnnnnnnnnnnnnnnnnnnnnnnnnnnnnnnnnnnnnnnnnnnnnnnnnnnnnnnnnnnnnnnnnnnnnnnnnnnnnnnnnnnnnnnnnnnnnnnnnnnnnnnnnnnnnnnnnnnnnnnnnnnnnnnnnnnnnnnnnnnnnnnnnnnnnnnnnnnnnnnnnnnnnnnnnnnnnnnnnnnnnnnnnnnnnnnnnnnnnnnnnnnnnnnnnnnnnnnnnnnnnnnnnnnnnnnnnnnnnnnnnnnnnnnnnnnnnnnnnnnnnnnnnnnnnnnnnnnnnnnnnnnnnnnnnnnnnnnnnnnnnnnnnnnnnnnnnnnnnnnnnnnnnnnnnnnnnnnnnnnnnnnnnnnnnnnnnnnnnnnnnnnnnnnnnnnnnnnnnnnnnnnnnnnnnnnnnnnnnnnnnnnnnnnnnnnnnnnnnnnnnnnnnnnnnnnnnnnnnnnnnnnnnnnnnnnnnnnnnnnnnnnnnnnnnnnnnnnnnnnnnnnnnnnnnnnnnnnnnnnnnnnnnnnnnnnnnnnnnnnnnnnnnnnnnnnnnnnnnnnnnnnnnnnnnnnnnnnnnnnnnnnnnnnnnnnnnnnnnnnnnnnnnnnnnnnnnnnnnnnnnnnnnnnnnnnnnnnnnnnnnnnnnnnnnnnnnnnnnnnnnnnnnnnnnnnnnnnnnnnnnnnnnnnnnnnnnnnnnnnnnnnnnnnnnnnnnnnnnnnnnnnnnnnnnnnnnnnnnnnnnnnnnnnnnnnnnnnnnnnnnnnnnnnnnnnnnnnnnnnnnnnnnnnnnnnnnnnnnnnnnnnnnnnnnnnnnnnnnnnnnnnnnnnnnnnnnnnnnnnnnnnnnnnnnnnnnnnnnnnnnnnnnnnnnnnnnnnnnnnnnnnnnnnnnnnnnnnnnnnnnnnnnnnnnnnnnnnnnnnnnnnnnnnnnnnnnnnnnnnnnnnnnnnnnnnnnnnnnnnnnnnnnnnnnnnnnnnnnnnnnnnnnnnnnnnnnnnnnnnnnnnnnnnnnnnnnnnnnnnnnnnnnnnnnnnnnnnnnnnnnnnnnnnnnnnnnnnnnnnnnnnnnnnnnnnnnnnnnnnnnnnnnnnnnnnnnnnnnnnnnnnnnnnnnnnnnnnnnnnnnnnnnnnnnnnnnnnnnnnnnnnnnnnnnnnnnnnnnnnnnnnnnnnnnnnnnnnnnnnnnnnnnnnnnnnnnnnnnnnnnnnnnnnnnnnnnnnnnnnnnnnnnnnnnnnnnnnnnnnnnnnnnnnnnnnnnnnnnnnnnnnnnnnnnnnnnnnnnnnnnnnnnnnnnnnnnnnnnnnnnnnnnnnnnnnnnnnnnnnnnnnnnnnnnnnnnnnnnnnnnnnnnnnnnnnnnnnnnnnnnnnnnnnnnnnnnnnnnnnnnnnnnnnnnnnnnnnnnnnnnnnnnnnnnnnnnnnnnnnnnnnnnnnnnnnnnnnnnnnnnnnnnnnnnnnnnnnnnnnnnnnnnnnnnnnnnnnnnnnnnnnnnnnnnnnnnnnnnnnnnnnnnnnnnnnnnnnnnnnnnnnnnnnnnnnnnnnnnnnnnnnnnnnnnnnnnnnnnnnnnnnnnnnnnnnnnnnnnnnnnnnnnnnnnnnnnnnnnnnnnnnnnnnnnnnnnnnnnnnnnnnnnnnnnnnnnnnnnnnnnnnnnnnnnnnnnnnnnnnnnnnnnnnnnnnnnnnnnnnnnnnnnnnnnnnnnnnnnnnnnnnnnnnnnnnnnnnnnnnnnnnnnnnnnnnnnnnnnnnnnnnnnnnnnnnnnnnnnnnnnnnnnnnnnnnnnnnnnnnnnnnnnnnnnnnnnnnnnnnnnnnnnnnnnnnnnnnnnnnnnnnnnnnnnnnnnnnnnnnnnnnnnnnnnnnnnnnnnnnnnnnnnnnnnnnnnnnnnnnnnnnnnnnnnnnnnnnnnnnnnnnnnnnnnnnnnnnnnnnnnnnnnnnnnnnnnnnnnnnnnnnnnnnnnnnnnnnnnnnnnnnnnnnnnnnnnnnnnnnnnnnnnnnnnnnnnnnnnnnnnnnnnnnnnnnnnnnnnnnnnnnnnnnnnnnnnnnnnnnnnnnnnnnnnnnnnnnnnnnnnnnnnnnnnnnnnnnnnnnnnnnnnnnnnnnnnnnnnnnnnnnnnnnnnnnnnnnnnnnnnnnnnnnnnnnnnnnnnnnnnnnnnnnnnnnnnnnnnnnnnnnnnnnnnnnnnnnnnnnnnnnnnnnnnnnnnnnnnnnnnnnnnnnnnnnnnnnnnnnnnnnnnnnnnnnnnnnnnnnnnnnnnnnnnnnnnnnnnnnnnnnnnnnnnnnnnnnnnnnnnnnnnnnnnnnnnnnnnnnnnnnnnnnnnnnnnnnnnnnnnnnnnnnnnnnnnnnnnnnnnnnnnnnnnnnnnnnnnnnnnnnnnnnnnnnnnnnnnnnnnnnnnnnnnnnnnnnnnnnnnnnnnnnnnnnnnnnnnnnnnnnnnnnnnnnnnnnnnnnnnnnnnnnnnnnnnnnnnnnnnnnnnnnnnnnnnnnnnnnnnnnnnnnnnnnnnnnnnnnnnnnnnnnnnnnnnnnnnnnnnnnnnnnnnnnnnnnnnnnnnnnnnnnnnnnnnnnnnnnnnnnnnnnnnnnnnnnnnnnnnnnnnnnnnnnnnnnnnnnnnnnnnnnnnnnnnnnnnnnnnnnnnnnnnnnnnnnnnnnnnnnnnnnnnnnnnnnnnnnnnnnnnnnnnnnnnnnnnnnnnnnnnnnnnnnnnnnnnnnnnnnnnnnnnnnnnnnnnnnnnnnnnnnnnnnnnnnnnnnnnnnnnnnnnnnnnnnnnnnnnnnnnnnnnnnnnnnnnnnnnnnnnnnnnnnnnnnnnnnnnnnnnnnnnnnnnnnnnnnnnnnnnnnnnnnnnnnnnnnnnnnnnnnnnnnnnnnnnnnnnnnnnnnnnnnnnnnnnnnnnnnnnnnnnnnnnnnnnnnnnnnnnnnnnnnnnnnnnnnnnnnnnnnnnnnnnnnnnnnnnnnnnnnnnnnnnnnnnnnnnnnnnnnnnnnnnnnnnnnnnnnnnnnnnnnnnnnnnnnnnnnnnnnnnnnnnnnnnnnnnnnnnnnnnnnnnnnnnnnnnnnnnnnnnnnnnnnnnnnnnnnnnnnnnnnnnnnnnnnnnnnnnnnnnnnnnnnnnnnnnnnnnnnnnnnnnnnnnnnnnnnnnnnnnnnnnnnnnnnnnnnnnnnnnnnnnnnnnnnnnnnnnnnnnnnnnnnnnnnnnnnnnnnnnnnnnnnnnnnnnnnnnnnnnnnnnnnnnnnnnnnnnnnnnnnnnnnnnnnnnnnnnnnnnnnnnnnnnnnnnnnnnnnnnnnnnnnnnnnnnnnnnnnnnnnnnnnnnnnnnnnnnnnnnnnnnnnnnnnnnnnnnnnnnnnnnnnnnnnnnnnnnnnnnnnnnnnnnnnnnnnnnnnnnnnnnnnnnnnnnnnnnnnnnnnnnnnnnnnnnnnnnnnnnnnnnnnnnnnnnnnnnnnnnnnnnnnnnnnnnnnnnnnnnnnnnnnnnnnnnnnnnnnnnnnnnnnnnnnnnnnnnnnnnnnnnnnnnnnnnnnnnnnnnnnnnnnnnnnnnnnnnnnnnnnnnnnnnnnnnnnnnnnnnnnnnnnnnnnnnnnnnnnnnnnnnnnnnnnnnnnnnnnnnnnnnnnnnnnnnnnnnnnnnnnnnnnnnnnnnnnnnnnnnnnnnnnnnnnnnnnnnnnnnnnnnnnnnnnnnnnnnnnnnnnnnnnnnnnnnnnnnnnnnnnnnnnnnnnnnnnnnnnnnnnnnnnnnnnnnnnnnnnnnnnnnnnnnnnnnnnnnnnnnnnnnnnnnnnnnnnnnnnnnnnnnnnnnnnnnnnnnnnnnnnnnnnnnnnnnnnnnnnnnnnnnnnnnnnnnnnnnnnnnnnnnnnnnnnnnnnnnnnnnnnnnnnnnnnnnnnnnnnnnnnnnnnnnnnnnnnnnnnnnnnnnnnnnnnnnnnnnnnnnnnnnnnnnnnnnnnnnnnnnnnnnnnnnnnnnnnnnnnnnnnnnnnnnnnnnnnnnnnnnnnnnnnnnnnnnnnnnnnnnnnnnnnnnnnnnnnnnnnnnnnnnnnnnnnnnnnnnnnnnnnnnnnnnnnnnnnnnnnnnnnnnnnnnnnnnnnnnnnnnnnnnnnnnnnnnnnnnnnnnnnnnnnnnnnnnnnnnnnnnnnnnnnnnnnnnnnnnnnnnnnnnnnnnnnnnnnnnnnnnnnnnnnnnnnnnnnnnnnnnnnnnnnnnnnnnnnnnnnnnnnnnnnnnnnnnnnnnnnnnnnnnnnnnnnnnnnnnnnnnnnnnnnnnnnnnnnnnnnnnnnnnnnnnnnnnnnnnnnnnnnnnnnnnnnnnnnnnnnnnnnnnnnnnnnnnnnnnnnnnnnnnnnnnnnnnnnnnnnnnnnnnnnnnnnnnnnnnnnnnnnnnnnnnnnnnnnnnnnnnnnnnnnnnnnnnnnnnnnnnnnnnnnnnnnnnnnnnnnnnnnnnnnnnnnnnnnnnnnnnnnnnnnnnnnnnnnnnnnnnnnnnnnnnnnnnnnnnnnnnnnnnnnnnnnnnnnnnnnnnnnnnnnnnnnnnnnnnnnnnnnnnnnnnnnnnnnnnnnnnnnnnnnnnnnnnnnnnnnnnnnnnnnnnnnnnnnnnnnnnnnnnnnnnnnnnnnnnnnnnnnnnnnnnnnnnnnnnnnnnnnnnnnnnnnnnnnnnnnnnnnnnnnnnnnnnnnnnnnnnnnnnnnnnnnnnnnnnnnnnnnnnnnnnnnnnnnnnnnnnnnnnnnnnnnnnnnnnnnnnnnnnnnnnnnnnnnnnnnnnnnnnnnnnnnnnnnnnnnnnnnnnnnnnnnnnnnnnnnnnnnnnnnnnnnnnnnnnnnnnnnnnnnnnnnnnnnnnnnnnnnnnnnnnnnnnnnnnnnnnnnnnnnnnnnnnnnnnnnnnnnnnnnnnnnnnnnnnnnnnnnnnnnnnnnnnnnnnnnnnnnnnnnnnnnnnnnnnnnnnnnnnnnnnnnnnnnnnnnnnnnnnnnnnnnnnnnnnnnnnnnnnnnnnnnnnnnnnnnnnnnnnnnnnnnnnnnnnnnnnnnnnnnnnnnnnnnnnnnnnnnnnnnnnnnnnnnnnnnnnnnnnnnnnnnnnnnnnnnnnnnnnnnnnnnnnnnnnnnnnnnnnnnnnnnnnnnnnnnnnnnnnnnnnnnnnnnnnnnnnnnnnnnnnnnnnnnnnnnnnnnnnnnnnnnnnnnnnnnnnnnnnnnnnnnnnnnnnnnnnnnnnnnnnnnnnnnnnnnnnnnnnnnnnnnnnnnnnnnnnnnnnnnnnnnnnnnnnnnnnnnnnnnnnnnnnnnnnnnnnnnnnnnnnnnnnnnnnnnnnnnnnnnnnnnnnnnnnnnnnnnnnnnnnnnnnnnnnnnnnnnnnnnnnnnnnnnnnnnnnnnnnnnnnnnnnnnnnnnnnnnnnnnnnnnnnnnnnnnnnnnnnnnnnnnnnnnnnnnnnnnnnnnnnnnnnnnnnnnnnnnnnnnnnnnnnnnnnnnnnnnnnnnnnnnnnnnnnnnnnnnnnnnnnnnnnnnnnnnnnnnnnnnnnnnnnnnnnnnnnnnnnnnnnnnnnnnnnnnnnnnnnnnnnnnnnnnnnnnnnnnnnnnnnnnnnnnnnnnnnnnnnnnnnnnnnnnnnnnnnnnnnnnnnnnnnnnnnnnnnnnnnnnnnnnnnnnnnnnnnnnnnnnnnnnnnnnnnnnnnnnnnnnnnnnnnnnnnnnnnnnnnnnnnnnnnnnnnnnnnnnnnnnnnnnnnnnnnnnnnnnnnnnnnnnnnnnnnnnnnnnnnnnnnnnnnnnnnnnnnnnnnnnnnnnnnnnnnnnnnnnnnnnnnnnnnnnnnnnnnnnnnnnnnnnnnnnnnnnnnnnnnnnnnnnnnnnnnnnnnnnnnnnnnnnnnnnnnnnnnnnnnnnnnnnnnnnnnnnnnnnnnnnnnnnnnnnnnnnnnnnnnnnnnnnnnnnnnnnnnnnnnnnnnnnnnnnnnnnnnnnnnnnnnnnnnnnnnnnnnnnnnnnnnnnnnnnnnnnnnnnnnnnnnnnnnnnnnnnnnnnnnnnnnnnnnnnnnnnnnnnnnnnnnnnnnnnnnnnnnnnnnnnnnnnnnnnnnnnnnnnnnnnnnnnnnnnnnnnnnnnnnnnnnnnnnnnnnnnnnnnnnnnnnnnnnnnnnnnnnnnnnnnnnnnnnnnnnnnnnnnnnnnnnnnnnnnnnnnnnnnnnnnnnnnnnnnnnnnnnnnnnnnnnnnnnnnnnnnnnnnnnnnnnnnnnnnnnnnnnnnnnnnnnnnnnnnnnnnnnnnnnnnnnnnnnnnnnnnnnnnnnnnnnnnnnnnnnnnnnnnnnnnnnnnnnnnnnnnnnnnnnnnnnnnnnnnnnnnnnnnnnnnnnnnnnnnnnnnnnnnnnnnnnnnnnnnnnnnnnnnnnnnnnnnnnnnnnnnnnnnnnnnnnnnnnnnnnnnnnnnnnnnnnnnnnnnnnnnnnnnnnnnnnnnnnnnnnnnnnnnnnnnnnnnnnnnnnnnnnnnnnnnnnnnnnnnnnnnnnnnnnnnnnnnnnnnnnnnnnnnnnnnnnnnnnnnnnnnnnnnnnnnnnnnnnnnnnnnnnnnnnnnnnnnnnnnnnnnnnnnnnnnnnnnnnnnnnnnnnnnnnnnnnnnnnnnnnnnnnnnnnnnnnnnnnnnnnnnnnnnnnnnnnnnnnnnnnnnnnnnnnnnnnnnnnnnnnnnnnnnnnnnnnnnnnnnnnnnnnnnnnnnnnnnnnnnnnnnnnnnnnnnnnnnnnnnnnnnnnnnnnnnnnnnnnnnnnnnnnnnnnnnnnnnnnnnnnnnnnnnnnnnnnnnnnnnnnnnnnnnnnnnnnnnnnnnnnnnnnnnnnnnnnnnnnnnnnnnnnnnnnnnnnnnnnnnnnnnnnnnnnnnnnnnnnnnnnnnnnnnnnnnnnnnnnnnnnnnnnnnnnnnnnnnnnnnnnnnnnnnnnnnnnnnnnnnnnnnnnnnnnnnnnnnnnnnnnnnnnnnnnnnnnnnnnnnnnnnnnnnnnnnnnnnnnnnnnnnnnnnnnnnnnnnnnnnnnnnnnnnnnnnnnnnnnnnnnnnnnnnnnnnnnnnnnnnnnnnnnnnnnnnnnnnnnnnnnnnnnnnnnnnnnnnnnnnnnnnnnnnnnnnnnnnnnnnnnnnnnnnnnnnnnnnnnnnnnnnnnnnnnnnnnnnnnnnnnnnnnnnnnnnnnnnnnnnnnnnnnnnnnnnnnnnnnnnnnnnnnnnnnnnnnnnnnnnnnnnnnnnnnnnnnnnnnnnnnnnnnnnnnnnnnnnnnnnnnnnnnnnnnnnnnnnnnnnnnnnnnnnnnnnnnnnnnnnnnnnnnnnnnnnnnnnnnnnnnnnnnnnnnnnnnnnnnnnnnnnnnnnnnnnnnnnnnnnnnnnnnnnnnnnnnnnnnnnnnnnnnnnnnnnnnnnnnnnnnnnnnnnnnnnnnnnnnnnnnnnnnnnnnnnnnnnnnnnnnnnnnnnnnnnnnnnnnnnnnnnnnnnnnnnnnnnnnnnnnnnnnnnnnnnnnnnnnnnnnnnnnnnnnnnnnnnnnnnnnnnnnnnnnnnnnnnnnnnnnnnnnnnnnnnnnnnnnnnnnnnnnnnnnnnnnnnnnnnnnnnnnnnnnnnnnnnnnnnnnnnnnnnnnnnnnnnnnnnnnnnnnnnnnnnnnnnnnnnnnnnnnnnnnnnnnnnnnnnnnnnnnnnnnnnnnnnnnnnnnnnnnnnnnnnnnnnnnnnnnnnnnnnnnnnnnnnnnnnnnnnnnnnnnnnnnnnnnnnnnnnnnnnnnnnnnnnnnnnnnnnnnnnnnnnnnnnnnnnnnnnnnnnnnnnnnnnnnnnnnnnnnnnnnnnnnnnnnnnnnnnnnnnnnnnnnnnnnnnnnnnnnnnnnnnnnnnnnnnnnnnnnnnnnnnnnnnnnnnnnnnnnnnnnnnnnnnnnnnnnnnnnnnnnnnnnnnnnnnnnnnnnnnnnnnnnnnnnnnnnnnnnnnnnnnnnnnnnnnnnnnnnnnnnnnnnnnnnnnnnnnnnnnnnnnnnnnnnnnnnnnnnnnnnnnnnnnnnnnnnnnnnnnnnnnnnnnnnnnnnnnnnnnnnnnnnnnnnnnnnnnnnnnnnnnnnnnnnnnnnnnnnnnnnnnnnnnnnnnnnnnnnnnnnnnnnnnnnnnnnnnnnnnnnnnnnnnnnnnnnnnnnnnnnnnnnnnnnnnnnnnnnnnnnnnnnnnnnnnnnnnnnnnnnnnnnnnnnnnnnnnnnnnnnnnnnnnnnnnnnnnnnnnnnnnnnnnnnnnnnnnnnnnnnnnnnnnnnnnnnnnnnnnnnnnnnnnnnnnnnnnnnnnnnnnnnnnnnnnnnnnnnnnnnnnnnnnnnnnnnnnnnnnnnnnnnnnnnnnnnnnnnnnnnnnnnnnnnnnnnnnnnnnnnnnnnnnnnnnnnnnnnnnnnnnnnnnnnnnnnnnnnnnnnnnnnnnnnnnnnnnnnnnnnnnnnnnnnnnnnnnnnnnnnnnnnnnnnnnnnnnnnnnnnnnnnnnnnnnnnnnnnnnnnnnnnnnnnnnnnnnnnnnnnnnnnnnnnnnnnnnnnnnnnnnnnnnnnnnnnnnnnnnnnnnnnnnnnnnnnnnnnnnnnnnnnnnnnnnnnnnnnnnnnnnnnnnnnnnnnnnnnnnnnnnnnnnnnnnnnnnnnnnnnnnnnnnnnnnnnnnnnnnnnnnnnnnnnnnnnnnnnnnnnnnnnnnnnnnnnnnnnnnnnnnnnnnnnnnnnnnnnnnnnnnnnnnnnnnnnnnnnnnnnnnnnnnnnnnnnnnnnnnnnnnnnnnnnnnnnnnnnnnnnnnnnnnnnnnnnnnnnnnnnnnnnnnnnnnnnnnnnnnnnnnnnnnnnnnnnnnnnnnnnnnnnnnnnnnnnnnnnnnnnnnnnnnnnnnnnnnnnnnnnnnnnnnnnnnnnnnnnnnnnnnnnnnnnnnnnnnnnnnnnnnnnnnnnnnnnnnnnnnnnnnnnnnnnnnnnnnnnnnnnnnnnnnnnnnnnnnnnnnnnnnnnnnnnnnnnnnnnnnnnnnnnnnnnnnnnnnnnnnnnnnnnnnnnnnnnnnnnnnnnnnnnnnnnnnnnnnnnnnnnnnnnnnnnnnnnnnnnnnnnnnnnnnnnnnnnnnnnnnnnnnnnnnnnnnnnnnnnnnnnnnnnnnnnnnnnnnnnnnnnnnnnnnnnnnnnnnnnnnnnnnnnnnnnnnnnnnnnnnnnnnnnnnnnnnnnnnnnnnnnnnnnnnnnnnnnnnnnnnnnnnnnnnnnnnnnnnnnnnnnnnnnnnnnnnnnnnnnnnnnnnnnnnnnnnnnnnnnnnnnnnnnnnnnnnnnnnnnnnnnnnnnnnnnnnnnnnnnnnnnnnnnnnnnnnnnnnnnnnnnnnnnnnnnnnnnnnnnnnnnnnnnnnnnnnnnnnnnnnnnnnnnnnnnnnnnnnnnnnnnnnnnnnnnnnnnnnnnnnnnnnnnnnnnnnnnnnnnnnnnnnnnnnnnnnnnnnnnnnnnnnnnnnnnnnnnnnnnnnnnnnnnnnnnnnnnnnnnnnnnnnnnnnnnnnnnnnnnnnnnnnnnnnnnnnnnnnnnnnnnnnnnnnnnnnnnnnnnnnnnnnnnnnnnnnnnnnnnnnnnnnnnnnnnnnnnnnnnnnnnnnnnnnnnnnnnnnnnnnnnnnnnnnnnnnnnnnnnnnnnnnnnnnnnnnnnnnnnnnnnnnnnnnnnnnnnnnnnnnnnnnnnnnnnnnnnnnnnnnnnnnnnnnnnnnnnnnnnnnnnnnnnnnnnnnnnnnnnnnnnnnnnnnnnnnnnnnnnnnnnnnnnnnnnnnnnnnnnnnnnnnnnnnnnnnnnnnnnnnnnnnnnnnnnnnnnnnnnnnnnnnnnnnnnnnnnnnnnnnnnnnnnnnnnnnnnnnnnnnnnnnnnnnnnnnnnnnnnnnnnnnnnnnnnnnnnnnnnnnnnnnnnnnnnnnnnnnnnnnnnnnnnnnnnnnnnnnnnnnnnnnnnnnnnnnnnnnnnnnnnnnnnnnnnnnnnnnnnnnnnnnnnnnnnnnnnnnnnnnnnnnnnnnnnnnnnnnnnnnnnnnnnnnnnnnnnnnnnnnnnnnnnnnnnnnnnnnnnnnnnnnnnnnnnnnnnnnnnnnnnnnnnnnnnnnnnnnnnnnnnnnnnnnnnnnnnnnnnnnnnnnnnnnnnnnnnnnnnnnnnnnnnnnnnnnnnnnnnnnnnnnnnnnnnnnnnnnnnnnnnnnnnnnnnnnnnnnnnnnnnnnnnnnnnnnnnnnnnnnnnnnnnnnnnnnnnnnnnnnnnnnnnnnnnnnnnnnnnnnnnnnnnnnnnnnnnnnnnnnnnnnnnnnnnnnnnnnnnnnnnnnnnnnnnnnnnnnnnnnnnnnnnnnnnnnnnnnnnnnnnnnnnnnnnnnnnnnnnnnnnnnnnnnnnnnnnnnnnnnnnnnnnnnnnnnnnnnnnnnnnnnnnnnnnnnnnnnnnnnnnnnnnnnnnnnnnnnnnnnnnnnnnnnnnnnnnnnnnnnnnnnnnnnnnnnnnnnnnnnnnnnnnnnnnnnnnnnnnnnnnnnnnnnnnnnnnnnnnnnnnnnnnnnnnnnnnnnnnnnnnnnnnnnnnnnnnnnnnnnnnnnnnnnnnnnnnnnnnnnnnnnnnnnnnnnnnnnnnnnnnnnnnnnnnnnnnnnnnnnnnnnnnnnnnnnnnnnnnnnnnnnnnnnnnnnnnnnnnnnnnnnnnnnnnnnnnnnnnnnnnnnnnnnnnnnnnnnnnnnnnnnnnnnnnnnnnnnnnnnnnnnnnnnnnnnnnnnnnnnnnnnnnnnnnnnnnnnnnnnnnnnnnnnnnnnnnnnnnnnnnnnnnnnnnnnnnnnnnnnnnnnnnnnnnnnnnnnnnnnnnnnnnnnnnnnnnnnnnnnnnnnnnnnnnnnnnnnnnnnnnnnnnnnnnnnnnnnnnnnnnnnnnnnnnnnnnnnnnnnnnnnnnnnnnnnnnnnnnnnnnnnnnnnnnnnnnnnnnnnnnnnnnnnnnnnnnnnnnnnnnnnnnnnnnnnnnnnnnnnnnnnnnnnnnnnnnnnnnnnnnnnnnnnnnnnnnnnnnnnnnnnnnnnnnnnnnnnnnnnnnnnnnnnnnnnnnnnnnnnnnnnnnnnnnnnnnnnnnnnnnnnnnnnnnnnnnnnnnnnnnnnnnnnnnnnnnnnnnnnnnnnnnnnnnnnnnnnnnnnnnnnnnnnnnnnnnnnnnnnnnnnnnnnnnnnnnnnnnnnnnnnnnnnnnnnnnnnnnnnnnnnnnnnnnnnnnnnnnnnnnnnnnnnnnnnnnnnnnnnnnnnnnnnnnnnnnnnnnnnnnnnnnnnnnnnnnnnnnnnnnnnnnnnnnnnnnnnnnnnnnnnnnnnnnnnnnnnnnnnnnnnnnnnnnnnnnnnnnnnnnnnnnnnnnnnnnnnnnnnnnnnnnnnnnnnnnnnnnnnnnnnnnnnnnnnnnnnnnnnnnnnnnnnnnnnnnnnnnnnnnnnnnnnnnnnnnnnnnnnnnnnnnnnnnnnnnnnnnnnnnnnnnnnnnnnnnnnnnnnnnnnnnnnnnnnnnnnnnnnnnnnnnnnnnnnnnnnnnnnnnnnnnnnnnnnnnnnnnnnnnnnnnnnnnnnnnnnnnnnnnnnnnnnnnnnnnnnnnnnnnnnnnnnnnnnnnnnnnnnnnnnnnnnnnnnnnnnnnnnnnnnnnnnnnnnnnnnnnnnnnnnnnnnnnnnnnnnnnnnnnnnnnnnnnnnnnnnnnnnnnnnnnnnnnnnnnnnnnnnnnnnnnnnnnnnnnnnnnnnnnnnnnnnnnnnnnnnnnnnnnnnnnnnnnnnnnnnnnnnnnnnnnnnnnnnnnnnnnnnnnnnnnnnnnnnnnnnnnnnnnnnnnnnnnnnnnnnnnnnnnnnnnnnnnnnnnnnnnnnnnnnnnnnnnnnnnnnnnnnnnnnnnnnnnnnnnnnnnnnnnnnnnnnnnnnnnnnnnnnnnnnnnnnnnnnnnnnnnnnnnnnnnnnnnnnnnnnnnnnnnnnnnnnnnnnnnnnnnnnnnnnnnnnnnnnnnnnnnnnnnnnnnnnnnnnnnnnnnnnnnnnnnnnnnnnnnnnnnnnnnnnnnnnnnnnnnnnnnnnnnnnnnnnnnnnnnnnnnnnnnnnnnnnnnnnnnnnnnnnnnnnnnnnnnnnnnnnnnnnnnnnnnnnnnnnnnnnnnnnnnnnnnnnnnnnnnnnnnnnnnnnnnnnnnnnnnnnnnnnnnnnnnnnnnnnnnnnnnnnnnnnnnnnnnnnnnnnnnnnnnnnnnnnnnnnnnnnnnnnnnnnnnnnnnnnnnnnnnnnnnnnnnnnnnnnnnnnnnnnnnnnnnnnnnnnnnnnnnnnnnnnnnnnnnnnnnnnnnnnnnnnnnnnnnnnnnnnnnnnnnnnnnnnnnnnnnnnnnnnnnnnnnnnnnnnnnnnnnnnnnnnnnnnnnnnnnnnnnnnnnnnnnnnnnnnnnnnnnnnnnnnnnnnnnnnnnnnnnnnnnnnnnnnnnnnnnnnnnnnnnnnnnnnnnnnnnnnnnnnnnnnnnnnnnnnnnnnnnnnnnnnnnnnnnnnnnnnnnnnnnnnnnnnnnnnnnnnnnnnnnnnnnnnnnnnnnnnnnnnnnnnnnnnnnnnnnnnnnnnnnnnnnnnnnnnnnnnnnnnnnnnnnnnnnnnnnnnnnnnnnnnnnnnnnnnnnnnnnnnnnnnnnnnnnnnnnnnnnnnnnnnnnnnnnnnnnnnnnnnnnnnnnnnnnnnnnnnnnnnnnnnnnnnnnnnnnnnnnnnnnnnnnnnnnnnnnnnnnnnnnnnnnnnnnnnnnnnnnnnnnnnnnnnnnnnnnnnnnnnnnnnnnnnnnnnnnnnnnnnnnnnnnnnnnnnnnnnnnnnnnnnnnnnnnnnnnnnnnnnnnnnnnnnnnnnnnnnnnnnnnnnnnnnnnnnnnnnnnnnnnnnnnnnnnnnnnnnnnnnnnnnnnnnnnnnnnnnnnnnnnnnnnnnnnnnnnnnnnnnnnnnnnnnnnnnnnnnnnnnnnnnnnnnnnnnnnnnnnnnnnnnnnnnnnnnnnnnnnnnnnnnnnnnnnnnnnnnnnnnnnnnnnnnnnnnnnnnnnnnnnnnnnnnnnnnnnnnnnnnnnnnnnnnnnnnnnnnnnnnnnnnnnnnnnnnnnnnnnnnnnnnnnnnnnnnnnnnnnnnnnnnnnnnnnnnnnnnnnnnnnnnnnnnnnnnnnnnnnnnnnnnnnnnnnnnnnnnnnnnnnnnnnnnnnnnnnnnnnnnnnnnnnnnnnnnnnnnnnnnnnnnnnnnnnnnnnnnnnnnnnnnnnnnnnnnnnnnnnnnnnnnnnnnnnnnnnnnnnnnnnnnnnnnnnnnnnnnnnnnnnnnnnnnnnnnnnnnnnnnnnnnnnnnnnnnnnnnnnnnnnnnnnnnnnnnnnnnnnnnnnnnnnnnnnnnnnnnnnnnnnnnnnnnnnnnnnnnnnnnnnnnnnnnnnnnnnnnnnnnnnnnnnnnnnnnnnnnnnnnnnnnnnnnnnnnnnnnnnnnnnnnnnnnnnnnnnnnnnnnnnnnnnnnnnnnnnnnnnnnnnnnnnnnnnnnnnnnnnnnnnnnnnnnnnnnnnnnnnnnnnnnnnnnnnnnnnnnnnnnnnnnnnnnnnnnnnnnnnnnnnnnnnnnnnnnnnnnnnnnnnnnnnnnnnnnnnnnnnnnnnnnnnnnnnnnnnnnnnnnnnnnnnnnnnnnnnnnnnnnnnnnnnnnnnnnnnnnnnnnnnnnnnnnnnnnnnnnnnnnnnnnnnnnnnnnnnnnnnnnnnnnnnnnnnnnnnnnnnnnnnnnnnnnnnnnnnnnnnnnnnnnnnnnnnnnnnnnnnnnnnnnnnnnnnnnnnnnnnnnnnnnnnnnnnnnnnnnnnnnnnnnnnnnnnnnnnnnnnnnnnnnnnnnnnnnnnnnnnnnnnnnnnnnnnnnnnnnnnnnnnnnnnnnnnnnnnnnnnnnnnnnnnnnnnnnnnnnnnnnnnnnnnnnnnnnnnnnnnnnnnnnnnnnnnnnnnnnnnnnnnnnnnnnnnnnnnnnnnnnnnnnnnnnnnnnnnnnnnnnnnnnnnnnnnnnnnnnnnnnnnnnnnnnnnnnnnnnnnnnnnnnnnnnnnnnnnnnnnnnnnnnnnnnnnnnnnnnnnnnnnnnnnnnnnnnnnnnnnnnnnnnnnnnnnnnnnnnnnnnnnnnnnnnnnnnnnnnnnnnnnnnnnnnnnnnnnnnnnnnnnnnnnnnnnnnnnnnnnnnnnnnnnnnnnnnnnnnnnnnnnnnnnnnnnnnnnnnnnnnnnnnnnnnnnnnnnnnnnnnnnnnnnnnnnnnnnnnnnnnnnnnnnnnnnnnnnnnnnnnnnnnnnnnnnnnnnnnnnnnnnnnnnnnnnnnnnnnnnnnnnnnnnnnnnnnnnnnnnnnnnnnnnnnnnnnnnnnnnnnnnnnnnnnnnnnnnnnnnnnnnnnnnnnnnnnnnnnnnnnnnnnnnnnnnnnnnnnnnnnnnnnnnnnnnnnnnnnnnnnnnnnnnnnnnnnnnnnnnnnnnnnnnnnnnnnnnnnnnnnnnnnnnnnnnnnnnnnnnnnnnnnnnnnnnnnnnnnnnnnnnnnnnnnnnnnnnnnnnnnnnnnnnnnnnnnnnnnnnnnnnnnnnnnnnnnnnnnnnnnnnnnnnnnnnnnnnnnnnnnnnnnnnnnnnnnnnnnnnnnnnnnnnnnnnnnnnnnnnnnnnnnnnnnnnnnnnnnnnnnnnnnnnnnnnnnnnnnnnnnnnnnnnnnnnnnnnnnnnnnnnnnnnnnnnnnnnnnnnnnnnnnnnnnnnnnnnnnnnnnnnnnnnnnnnnnnnnnnnnnnnnnnnnnnnnnnnnnnnnnnnnnnnnnnnnnnnnnnnnnnnnnnnnnnnnnnnnnnnnnnnnnnnnnnnnnnnnnnnnnnnnnnnnnnnnnnnnnnnnnnnnnnnnnnnnnnnnnnnnnnnnnnnnnnnnnnnnnnnnnnnnnnnnnnnnnnnnnnnnnnnnnnnnnnnnnnnnnnnnnnnnnnnnnnnnnnnnnnnnnnnnnnnnnnnnnnnnnnnnnnnnnnnnnnnnnnnnnnnnnnnnnnnnnnnnnnnnnnnnnnnnnnnnnnnnnnnnnnnnnnnnnnnnnnnnnnnnnnnnnnnnnnnnnnnnnnnnnnnnnnnnnnnnnnnnnnnnnnnnnnnnnnnnnnnnnnnnnnnnnnnnnnnnnnnnnnnnnnnnnnnnnnnnnnnnnnnnnnnnnnnnnnnnnnnnnnnnnnnnnnnnnnnnnnnnnnnnnnnnnnnnnnnnnnnnnnnnnnnnnnnnnnnnnnnnnnnnnnnnnnnnnnnnnnnnnnnnnnnnnnnnnnnnnnnnnnnnnnnnnnnnnnnnnnnnnnnnnnnnnnnnnnnnnnnnnnnnnnnnnnnnnnnnnnnnnnnnnnnnnnnnnnnnnnnnnnnnnnnnnnnnnnnnnnnnnnnnnnnnnnnnnnnnnnnnnnnnnnnnnnnnnnnnnnnnnnnnnnnnnnnnnnnnnnnnnnnnnnnnnnnnnnnnnnnnnnnnnnnnnnnnnnnnnnnnnnnnnnnnnnnnnnnnnnnnnnnnnnnnnnnnnnnnnnnnnnnnnnnnnnnnnnnnnnnnnnnnnnnnnnnnnnnnnnnnnnnnnnnnnnnnnnnnnnnnnnnnnnnnnnnnnnnnnnnnnnnnnnnnnnnnnnnnnnnnnnnnnnnnnnnnnnnnnnnnnnnnnnnnnnnnnnnnnnnnnnnnnnnnnnnnnnnnnnnnnnnnnnnnnnnnnnnnnnnnnnnnnnnnnnnnnnnnnnnnnnnnnnnnnnnnnnnnnnnnnnnnnnnnnnnnnnnnnnnnnnnnnnnnnnnnnnnnnnnnnnnnnnnnnnnnnnnnnnnnnnnnnnnnnnnnnnnnnnnnnnnnnnnnnnnnnnnnnnnnnnnnnnnnnnnnnnnnnnnnnnnnnnnnnnnnnnnnnnnnnnnnnnnnnnnnnnnnnnnnnnnnnnnnnnnnnnnnnnnnnnnnnnnnnnnnnnnnnnnnnnnnnnnnnnnnnnnnnnnnnnnnnnnnnnnnnnnnnnnnnnnnnnnnnnnnnnnnnnnnnnnnnnnnnnnnnnnnnnnnnnnnnnnnnnnnnnnnnnnnnnnnnnnnnnnnnnnnnnnnnnnnnnnnnnnnnnnnnnnnnnnnnnnnnnnnnnnnnnnnnnnnnnnnnnnnnnnnnnnnnnnnnnnnnnnnnnnnnnnnnnnnnnnnnnnnnnnnnnnnnnnnnnnnnnnnnnnnnnnnnnnnnnnnnnnnnnnnnnnnnnnnnnnnnnnnnnnnnnnnnnnnnnnnnnnnnnnnnnnnnnnnnnnnnnnnnnnnnnnnnnnnnnnnnnnnnnnnnnnnnnnnnnnnnnnnnnnnnnnnnnnnnnnnnnnnnnnnnnnnnnnnnnnnnnnnnnnnnnnnnnnnnnnnnnnnnnnnnnnnnnnnnnnnnnnnnnnnnnnnnnnnnnnnnnnnnnnnnnnnnnnnnnnnnnnnnnnnnnnnnnnnnnnnnnnnnnnnnnnnnnnnnnnnnnnnnnnnnnnnnnnnnnnnnnnnnnnnnnnnnnnnnnnnnnnnnnnnnnnnnnnnnnnnnnnnnnnnnnnnnnnnnnnnnnnnnnnnnnnnnnnnnnnnnnnnnnnnnnnnnnnnnnnnnnnnnnnnnnnnnnnnnnnnnnnnnnnnnnnnnnnnnnnnnnnnnnnnnnnnnnnnnnnnnnnnnnnnnnnnnnnnnnnnnnnnnnnnnnnnnnnnnnnnnnnnnnnnnnnnnnnnnnnnnnnnnnnnnnnnnnnnnnnnnnnnnnnnnnnnnnnnnnnnnnnnnnnnnnnnnnnnnnnnnnnnnnnnnnnnnnnnnnnnnnnnnnnnnnnnnnnnnnnnnnnnnnnnnnnnnnnnnnnnnnnnnnnnnnnnnnnnnnnnnnnnnnnnnnnnnnnnnnnnnnnnnnnnnnnnnnnnnnnnnnnnnnnnnnnnnnnnnnnnnnnnnnnnnnnnnnnnnnnnnnnnnnnnnnnnnnnnnnnnnnnnnnnnnnnnnnnnnnnnnnnnnnnnnnnnnnnnnnnnnnnnnnnnnnnnnnnnnnnnnnnnnnnnnnnnnnnnnnnnnnnnnnnnnnnnnnnnnnnnnnnnnnnnnnnnnnnnnnnnnnnnnnnnnnnnnnnnnnnnnnnnnnnnnnnnnnnnnnnnnnnnnnnnnnnnnnnnnnnnnnnnnnnnnnnnnnnnnnnnnnnnnnnnnnnnnnnnnnnnnnnnnnnnnnnnnnnnnnnnnnnnnnnnnnnnnnnnnnnnnnnnnnnnnnnnnnnnnnnnnnnnnnnnnnnnnnnnnnnnnnnnnnnnnnnnnnnnnnnnnnnnnnnnnnnnnnnnnnnnnnnnnnnnnnnnnnnnnnnnnnnnnnnnnnnnnnnnnnnnnnnnnnnnnnnnnnnnnnnnnnnnnnnnnnnnnnnnnnnnnnnnnnnnnnnnnnnnnnnnnnnnnnnnnnnnnnnnnnnnnnnnnnnnnnnnnnnnnnnnnnnnnnnnnnnnnnnnnnnnnnnnnnnnnnnnnnnnnnnnnnnnnnnnnnnnnnnnnnnnnnnnnnnnnnnnnnnnnnnnnnnnnnnnnnnnnnnnnnnnnnnnnnnnnnnnnnnnnnnnnnnnnnnnnnnnnnnnnnnnnnnnnnnnnnnnnnnnnnnnnnnnnnnnnnnnnnnnnnnnnnnnnnnnnnnnnnnnnnnnnnnnnnnnnnnnnnnnnnnnnnnnnnnnnnnnnnnnnnnnnnnnnnnnnnnnnnnnnnnnnnnnnnnnnnnnnnnnnnnnnnnnnnnnnnnnnnnnnnnnnnnnnnnnnnnnnnnnnnnnnnnnnnnnnnnnnnnnnnnnnnnnnnnnnnnnnnnnnnnnnnnnnnnnnnnnnnnnnnnnnnnnnnnnnnnnnnnnnnnnnnnnnnnnnnnnnnnnnnnnnnnnnnnnnnnnnnnnnnnnnnnnnnnnnnnnnnnnnnnnnnnnnnnnnnnnnnnnnnnnnnnnnnnnnnnnnnnnnnnnnnnnnnnnnnnnnnnnnnnnnnnnnnnnnnnnnnnnnnnnnnnnnnnnnnnnnnnnnnnnnnnnnnnnnnnnnnnnnnnnnnnnnnnnnnnnnnnnnnnnnnnnnnnnnnnnnnnnnnnnnnnnnnnnnnnnnnnnnnnnnnnnnnnnnnnnnnnnnnnnnnnnnnnnnnnnnnnnnnnnnnnnnnnnnnnnnnnnnnnnnnnnnnnnnnnnnnnnnnnnnnnnnnnnnnnnnnnnnnnnnnnnnnnnnnnnnnnnnnnnnnnnnnnnnnnnnnnnnnnnnnnnnnnnnnnnnnnnnnnnnnnnnnnnnnnnnnnnnnnnnnnnnnnnnnnnnnnnnnnnnnnnnnnnnnnnnnnnnnnnnnnnnnnnnnnnnnnnnnnnnnnnnnnnnnnnnnnnnnnnnnnnnnnnnnnnnnnnnnnnnnnnnnnnnnnnnnnnnnnnnnnnnnnnnnnnnnnnnnnnnnnnnnnnnnnnnnnnnnnnnnnnnnnnnnnnnnnnnnnnnnnnnnnnnnnnnnnnnnnnnnnnnnnnnnnnnnnnnnnnnnnnnnnnnnnnnnnnnnnnnnnnnnnnnnnnnnnnnnnnnnnnnnnnnnnnnnnnnnnnnnnnnnnnnnnnnnnnnnnnnnnnnnnnnnnnnnnnnnnnnnnnnnnnnnnnnnnnnnnnnnnnnnnnnnnnnnnnnnnnnnnnnnnnnnnnnnnnnnnnnnnnnnnnnnnnnnnnnnnnnnnnnnnnnnnnnnnnnnnnnnnnnnnnnnnnnnnnnnnnnnnnnnnnnnnnnnnnnnnnnnnnnnnnnnnnnnnnnnnnnnnnnnnnnnnnnnnnnnnnnnnnnnnnnnnnnnnnnnnnnnnnnnnnnnnnnnnnnnnnnnnnnnnnnnnnnnnnnnnnnnnnnnnnnnnnnnnnnnnnnnnnnnnnnnnnnnnnnnnnnnnnnnnnnnnnnnnnnnnnnnnnnnnnnnnnnnnnnnnnnnnnnnnnnnnnnnnnnnnnnnnnnnnnnnnnnnnnnnnnnnnnnnnnnnnnnnnnnnnnnnnnnnnnnnnnnnnnnnnnnnnnnnnnnnnnnnnnnnnnnnnnnnnnnnnnnnnnnnnnnnnnnnnnnnnnnnnnnnnnnnnnnnnnnnnnnnnnnnnnnnnnnnnnnnnnnnnnnnnnnnnnnnnnnnnnnnnnnnnnnnnnnnnnnnnnnnnnnnnnnnnnnnnnnnnnnnnnnnnnnnnnnnnnnnnnnnnnnnnnnnnnnnnnnnnnnnnnnnnnnnnnnnnnnnnnnnnnnnnnnnnnnnnnnnnnnnnnnnnnnnnnnnnnnnnnnnnnnnnnnnnnnnnnnnnnnnnnnnnnnnnnnnnnnnnnnnnnnnnnnnnnnnnnnnnnnnnnnnnnnnnnnnnnnnnnnnnnnnnnnnnnnnnnnnnnnnnnnnnnnnnnnnnnnnnnnnnnnnnnnnnnnnnnnnnnnnnnnnnnnnnnnnnnnnnnnnnnnnnnnnnnnnnnnnnnnnnnnnnnnnnnnnnnnnnnnnnnnnnnnnnnnnnnnnnnnnnnnnnnnnnnnnnnnnnnnnnnnnnnnnnnnnnnnnnnnnnnnnnnnnnnnnnnnnnnnnnnnnnnnnnnnnnnnnnnnnnnnnnnnnnnnnnnnnnnnnnnnnnnnnnnnnnnnnnnnnnnnnnnnnnnnnnnnnnnnnnnnnnnnnnnnnnnnnnnnnnnnnnnnnnnnnnnnnnnnnnnnnnnnnnnnnnnnnnnnnnnnnnnnnnnnnnnnnnnnnnnnnnnnnnnnnnnnnnnnnnnnnnnnnnnnnnnnnnnnnnnnnnnnnnnnnnnnnnnnnnnnnnnnnnnnnnnnnnnnnnnnnnnnnnnnnnnnnnnnnnnnnnnnnnnnnnnnnnnnnnnnnnnnnnnnnnnnnnnnnnnnnnnnnnnnnnnnnnnnnnnnnnnnnnnnnnnnnnnnnnnnnnnnnnnnnnnnnnnnnnnnnnnnnnnnnnnnnnnnnnnnnnnnnnnnnnnnnnnnnnnnnnnnnnnnnnnnnnnnnnnnnnnnnnnnnnnnnnnnnnnnnnnnnnnnnnnnnnnnnnnnnnnnnnnnnnnnnnnnnnnnnnnnnnnnnnnnnnnnnnnnnnnnnnnnnnnnnnnnnnnnnnnnnnnnnnnnnnnnnnnnnnnnnnnnnnnnnnnnnnnnnnnnnnnnnnnnnnnnnnnnnnnnnnnnnnnnnnnnnnnnnnnnnnnnnnnnnnnnnnnnnnnnnnnnnnnnnnnnnnnnnnnnnnnnnnnnnnnnnnnnnnnnnnnnnnnnnnnnnnnnnnnnnnnnnnnnnnnnnnnnnnnnnnnnnnnnnnnnnnnnnnnnnnnnnnnnnnnnnnnnnnnnnnnnnnnnnnnnnnnnnnnnnnnnnnnnnnnnnnnnnnnnnnnnnnnnnnnnnnnnnnnnnnnnnnnnnnnnnnnnnnnnnnnnnnnnnnnnnnnnnnnnnnnnnnnnnnnnnnnnnnnnnnnnnnnnnnnnnnnnnnnnnnnnnnnnnnnnnnnnnnnnnnnnnnnnnnnnnnnnnnnnnnnnnnnnnnnnnnnnnnnnnnnnnnnnnnnnnnnnnnnnnnnnnnnnnnnnnnnnnnnnnnnnnnnnnnnnnnnnnnnnnnnnnnnnnnnnnnnnnnnnnnnnnnnnnnnnnnnnnnnnnnnnnnnnnnnnnnnnnnnnnnnnnnnnnnnnnnnnnnnnnnnnnnnnnnnnnnnnnnnnnnnnnnnnnnnnnnnnnnnnnnnnnnnnnnnnnnnnnnnnnnnnnnnnnnnnnnnnnnnnnnnnnnnnnnnnnnnnnnnnnnnnnnnnnnnnnnnnnnnnnnnnnnnnnnnnnnnnnnnnnnnnnnnnnnnnnnnnnnnnnnnnnnnnnnnnnnnnnnnnnnnnnnnnnnnnnnnnnnnnnnnnnnnnnnnnnnnnnnnnnnnnnnnnnnnnnnnnnnnnnnnnnnnnnnnnnnnnnnnnnnnnnnnnnnnnnnnnnnnnnnnnnnnnnnnnnnnnnnnnnnnnnnnnnnnnnnnnnnnnnnnnnnnnnnnnnnnnnnnnnnnnnnnnnnnnnnnnnnnnnnnnnnnnnnnnnnnnnnnnnnnnnnnnnnnnnnnnnnnnnnnnnnnnnnnnnnnnnnnnnnnnnnnnnnnnnnnnnnnnnnnnnnnnnnnnnnnnnnnnnnnnnnnnnnnnnnnnnnnnnnnnnnnnnnnnnnnnnnnnnnnnnnnnnnnnnnnnnnnnnnnnnnnnnnnnnnnnnnnnnnnnnnnnnnnnnnnnnnnnnnnnnnnnnnnnnnnnnnnnnnnnnnnnnnnnnnnnnnnnnnnnnnnnnnnnnnnnnnnnnnnnnnnnnnnnnnnnnnnnnnnnnnnnnnnnnnnnnnnnnnnnnnnnnnnnnnnnnnnnnnnnnnnnnnnnnnnnnnnnnnnnnnnnnnnnnnnnnnnnnnnnnnnnnnnnnnnnnnnnnnnnnnnnnnnnnnnnnnnnnnnnnnnnnnnnnnnnnnnnnnnnnnnnnnnnnnnnnnnnnnnnnnnnnnnnnnnnnnnnnnnnnnnnnnnnnnnnnnnnnnnnnnnnnnnnnnnnnnnnnnnnnnnnnnnnnnnnnnnnnnnnnnnnnnnnnnnnnnnnnnnnnnnnnnnnnnnnnnnnnnnnnnnnnnnnnnnnnnnnnnnnnnnnnnnnnnnnnnnnnnnnnnnnnnnnnnnnnnnnnnnnnnnnnnnnnnnnnnnnnnnnnnnnnnnnnnnnnnnnnnnnnnnnnnnnnnnnnnnnnnnnnnnnnnnnnnnnnnnnnnnnnnnnnnnnnnnnnnnnnnnnnnnnnnnnnnnnnnnnnnnnnnnnnnnnnnnnnnnnnnnnnnnnnnnnnnnnnnnnnnnnnnnnnnnnnnnnnnnnnnnnnnnnnnnnnnnnnnnnnnnnnnnnnnnnnnnnnnnnnnnnnnnnnnnnnnnnnnnnnnnnnnnnnnnnnnnnnnnnnnnnnnnnnnnnnnnnnnnnnnnnnnnnnnnnnnnnnnnnnnnnnnnnnnnnnnnnnnnnnnnnnnnnnnnnnnnnnnnnnnnnnnnnnnnnnnnnnnnnnnnnnnnnnnnnnnnnnnnnnnnnnnnnnnnnnnnnnnnnnnnnnnnnnnnnnnnnnnnnnnnnnnnnnnnnnnnnnnnnnnnnnnnnnnnnnnnnnnnnnnnnnnnnnnnnnnnnnnnnnnnnnnnnnnnnnnnnnnnnnnnnnnnnnnnnnnnnnnnnnnnnnnnnnnnnnnnnnnnnnnnnnnnnnnnnnnnnnnnnnnnnnnnnnnnnnnnnnnnnnnnnnnnnnnnnnnnnnnnnnnnnnnnnnnnnnnnnnnnnnnnnnnnnnnnnnnnnnnnnnnnnnnnnnnnnnnnnnnnnnnnnnnnnnnnnnnnnnnnnnnnnnnnnnnnnnnnnnnnnnnnnnnnnnnnnnnnnnnnnnnnnnnnnnnnnnnnnnnnnnnnnnnnnnnnnnnnnnnnnnnnnnnnnnnnnnnnnnnnnnnnnnnnnnnnnnnnnnnnnnnnnnnnnnnnnnnnnnnnnnnnnnnnnnnnnnnnnnnnnnnnnnnnnnnnnnnnnnnnnnnnnnnnnnnnnnnnnnnnnnnnnnnnnnnnnnnnnnnnnnnnnnnnnnnnnnnnnnnnnnnnnnnnnnnnnnnnnnnnnnnnnnnnnnnnnnnnnnnnnnnnnnnnnnnnnnnnnnnnnnnnnnnnnnnnnnnnnnnnnnnnnnnnnnnnnnnnnnnnnnnnnnnnnnnnnnnnnnnnnnnnnnnnnnnnnnnnnnnnnnnnnnnnnnnnnnnnnnnnnnnnnnnnnnnnnnnnnnnnnnnnnnnnnnnnnnnnnnnnnnnnnnnnnnnnnnnnnnnnnnnnnnnnnnnnnnnnnnnnnnnnnnnnnnnnnnnnnnnnnnnnnnnnnnnnnnnnnnnnnnnnnnnnnnnnnnnnnnnnnnnnnnnnnnnnnnnnnnnnnnnnnnnnnnnnnnnnnnnnnnnnnnnnnnnnnnnnnnnnnnnnnnnnnnnnnnnnnnnnnnnnnnnnnnnnnnnnnnnnnnnnnnnnnnnnnnnnnnnnnnnnnnnnnnnnnnnnnnnnnnnnnnnnnnnnnnnnnnnnnnnnnnnnnnnnnnnnnnnnnnnnnnnnnnnnnnnnnnnnnnnnnnnnnnnnnnnnnnnnnnnnnnnnnnnnnnnnnnnnnnnnnnnnnnnnnnnnnnnnnnnnnnnnnnnnnnnnnnnnnnnnnnnnnnnnnnnnnnnnnnnnnnnnnnnnnnnnnnnnnnnnnnnnnnnnnnnnnnnnnnnnnnnnnnnnnnnnnnnnnnnnnnnnnnnnnnnnnnnnnnnnnnnnnnnnnnnnnnnnnnnnnnnnnnnnnnnnnnnnnnnnnnnnnnnnnnnnnnnnnnnnnnnnnnnnnnnnnnnnnnnnnnnnnnnnnnnnnnnnnnnnnnnnnnnnnnnnnnnnnnnnnnnnnnnnnnnnnnnnnnnnnnnnnnnnnnnnnnnnnnnnnnnnnnnnnnnnnnnnnnnnnnnnnnnnnnnnnnnnnnnnnnnnnnnnnnnnnnnnnnnnnnnnnnnnnnnnnnnnnnnnnnnnnnnnnnnnnnnnnnnnnnnnnnnnnnnnnnnnnnnnnnnnnnnnnnnnnnnnnnnnnnnnnnnnnnnnnnnnnnnnnnnnnnnnnnnnnnnnnnnnnnnnnnnnnnnnnnnnnnnnnnnnnnnnnnnnnnnnnnnnnnnnnnnnnnnnnnnnnnnnnnnnnnnnnnnnnnnnnnnnnnnnnnnnnnnnnnnnnnnnnnnnnnnnnnnnnnnnnnnnnnnnnnnnnnnnnnnnnnnnnnnnnnnnnnnnnnnnnnnnnnnnnnnnnnnnnnnnnnnnnnnnnnnnnnnnnnnnnnnnnnnnnnnnnnnnnnnnnnnnnnnnnnnnnnnnnnnnnnnnnnnnnnnnnnnnnnnnnnnnnnnnnnnnnnnnnnnnnnnnnnnnnnnnnnnnnnnnnnnnnnnnnnnnnnnnnnnnnnnnnnnnnnnnnnnnnnnnnnnnnnnnnnnnnnnnnnnnnnnnnnnnnnnnnnnnnnnnnnnnnnnnnnnnnnnnnnnnnnnnnnnnnnnnnnnnnnnnnnnnnnnnnnnnnnnnnnnnnnnnnnnnnnnnnnnnnnnnnnnnnnnnnnnnnnnnnnnnnnnnnnnnnnnnnnnnnnnnnnnnnnnnnnnnnnnnnnnnnnnnnnnnnnnnnnnnnnnnnnnnnnnnnnnnnnnnnnnnnnnnnnnnnnnnnnnnnnnnnnnnnnnnnnnnnnnnnnnnnnnnnnnnnnnnnnnnnnnnnnnnnnnnnnnnnnnnnnnnnnnnnnnnnnnnnnnnnnnnnnnnnnnnnnnnnnnnnnnnnnnnnnnnnnnnnnnnnnnnnnnnnnnnnnnnnnnnnnnnnnnnnnnnnnnnnnnnnnnnnnnnnnnnnnnnnnnnnnnnnnnnnnnnnnnnnnnnnnnnnnnnnnnnnnnnnnnnnnnnnnnnnnnnnnnnnnnnnnnnnnnnnnnnnnnnnnnnnnnnnnnnnnnnnnnnnnnnnnnnnnnnnnnnnnnnnnnnnnnnnnnnnnnnnnnnnnnnnnnnnnnnnnnnnnnnnnnnnnnnnnnnnnnnnnnnnnnnnnnnnnnnnnnnnnnnnnnnnnnnnnnnnnnnnnnnnnnnnnnnnnnnnnnnnnnnnnnnnnnnnnnnnnnnnnnnnnnnnnnnnnnnnnnnnnnnnnnnnnnnnnnnnnnnnnnnnnnnnnnnnnnnnnnnnnnnnnnnnnnnnnnnnnnnnnnnnnnnnnnnnnnnnnnnnnnnnnnnnnnnnnnnnnnnnnnnnnnnnnnnnnnnnnnnnnnnnnnnnnnnnnnnnnnnnnnnnnnnnnnnnnnnnnnnnnnnnnnnnnnnnnnnnnnnnnnnnnnnnnnnnnnnnnnnnnnnnnnnnnnnnnnnnnnnnnnnnnnnnnnnnnnnnnnnnnnnnnnnnnnnnnnnnnnnnnnnnnnnnnnnnnnnnnnnnnnnnnnnnnnnnnnnnnnnnnnnnnnnnnnnnnnnnnnnnnnnnnnnnnnnnnnnnnnnnnnnnnnnnnnnnnnnnnnnnnnnnnnnnnnnnnnnnnnnnnnnnnnnnnnnnnnnnnnnnnnnnnnnnnnnnnnnnnnnnnnnnnnnnnnnnnnnnnnnnnnnnnnnnnnnnnnnnnnnnnnnnnnnnnnnnnnnnnnnnnnnnnnnnnnnnnnnnnnnnnnnnnnnnnnnnnnnnnnnnnnnnnnnnnnnnnnnnnnnnnnnnnnnnnnnnnnnnnnnnnnnnnnnnnnnnnnnnnnnnnnnnnnnnnnnnnnnnnnnnnnnnnnnnnnnnnnnnnnnnnnnnnnnnnnnnnnnnnnnnnnnnnnnnnnnnnnnnnnnnnnnnnnnnnnnnnnnnnnnnnnnnnnnnnnnnnnnnnnnnnnnnnnnnnnnnnnnnnnnnnnnnnnnnnnnnnnnnnnnnnnnnnnnnnnnnnnnnnnnnnnnnnnnnnnnnnnnnnnnnnnnnnnnnnnnnnnnnnnnnnnnnnnnnnnnnnnnnnnnnnnnnnnnnnnnnnnnnnnnnnnnnnnnnnnnnnnnnnnnnnnnnnnnnnnnnnnnnnnnnnnnnnnnnnnnnnnnnnnnnnnnnnnnnnnnnnnnnnnnnnnnnnnnnnnnnnnnnnnnnnnnnnnnnnnnnnnnnnnnnnnnnnnnnnnnnnnnnnnnnnnnnnnnnnnnnnnnnnnnnnnnnnnnnnnnnnnnnnnnnnnnnnnnnnnnnnnnnnnnnnnnnnnnnnnnnnnnnnnnnnnnnnnnnnnnnnnnnnnnnnnnnnnnnnnnnnnnnnnnnnnnnnnnnnnnnnnnnnnnnnnnnnnnnnnnnnnnnnnnnnnnnnnnnnnnnnnnnnnnnnnnnnnnnnnnnnnnnnnnnnnnnnnnnnnnnnnnnnnnnnnnnnnnnnnnnnnnnnnnnnnnnnnnnnnnnnnnnnnnnnnnnnnnnnnnnnnnnnnnnnnnnnnnnnnnnnnnnnnnnnnnnnnnnnnnnnnnnnnnnnnnnnnnnnnnnnnnnnnnnnnnnnnnnnnnnnnnnnnnnnnnnnnnnnnnnnnnnnnnnnnnnnnnnnnnnnnnnnnnnnnnnnnnnnnnnnnnnnnnnnnnnnnnnnnnnnnnnnnnnnnnnnnnnnnnnnnnnnnnnnnnnnnnnnnnnnnnnnnnnnnnnnnnnnnnnnnnnnnnnnnnnnnnnnnnnnnnnnnnnnnnnnnnnnnnnnnnnnnnnnnnnnnnnnnnnnnnnnnnnnnnnnnnnnnnnnnnnnnnnnnnnnnnnnnnnnnnnnnnnnnnnnnnnnnnnnnnnnnnnnnnnnnnnnnnnnnnnnnnnnnnnnnnnnnnnnnnnnnnnnnnnnnnnnnnnnnnnnnnnnnnnnnnnnnnnnnnnnnnnnnnnnnnnnnnnnnnnnnnnnnnnnnnnnnnnnnnnnnnnnnnnnnnnnnnnnnnnnnnnnnnnnnnnnnnnnnnnnnnnnnnnnnnnnnnnnnnnnnnnnnnnnnnnnnnnnnnnnnnnnnnnnnnnnnnnnnnnnnnnnnnnnnnnnnnnnnnnnnnnnnnnnnnnnnnnnnnnnnnnnnnnnnnnnnnnnnnnnnnnnnnnnnnnnnnnnnnnnnnnnnnnnnnnnnnnnnnnnnnnnnnnnnnnnnnnnnnnnnnnnnnnnnnnnnnnnnnnnnnnnnnnnnnnnnnnnnnnnnnnnnnnnnnnnnnnnnnnnnnnnnnnnnnnnnnnnnnnnnnnnnnnnnnnnnnnnnnnnnnnnnnnnnnnnnnnnnnnnnnnnnnnnnnnnnnnnnnnnnnnnnnnnnnnnnnnnnnnnnnnnnnnnnnnnnnnnnnnnnnnnnnnnnnnnnnnnnnnnnnnnnnnnnnnnnnnnnnnnnnnnnnnnnnnnnnnnnnnnnnnnnnnnnnnnnnnnnnnnnnnnnnnnnnnnnnnnnnnnnnnnnnnnnnnnnnnnnnnnnnnnnnnnnnnnnnnnnnnnnnnnnnnnnnnnnnnnnnnnnnnnnnnnnnnnnnnnnnnnnnnnnnnnnnnnnnnnnnnnnnnnnnnnnnnnnnnnnnnnnnnnnnnnnnnnnnnnnnnnnnnnnnnnnnnnnnnnnnnnnnnnnnnnnnnnnnnnnnnnnnnnnnnnnnnnnnnnnnnnnnnnnnnnnnnnnnnnnnnnnnnnnnnnnnnnnnnnnnnnnnnnnnnnnnnnnnnnnnnnnnnnnnnnnnnnnnnnnnnnnnnnnnnnnnnnnnnnnnnnnnnnnnnnnnnnnnnnnnnnnnnnnnnnnnnnnnnnnnnnnnnnnnnnnnnnnnnnnnnnnnnnnnnnnnnnnnnnnnnnnnnnnnnnnnnnnnnnnnnnnnnnnnnnnnnnnnnnnnnnnnnnnnnnnnnnnnnnnnnnnnnnnnnnnnnnnnnnnnnnnnnnnnnnnnnnnnnnnnnnnnnnnnnnnnnnnnnnnnnnnnnnnnnnnnnnnnnnnnnnnnnnnnnnnnnnnnnnnnnnnnnnnnnnnnnnnnnnnnnnnnnnnnnnnnnnnnnnnnnnnnnnnnnnnnnnnnnnnnnnnnnnnnnnnnnnnnnnnnnnnnnnnnnnnnnnnnnnnnnnnnnnnnnnnnnnnnnnnnnnnnnnnnnnnnnnnnnnnnnnnnnnnnnnnnnnnnnnnnnnnnnnnnnnnnnnnnnnnnnnnnnnnnnnnnnnnnnnnnnnnnnnnnnnnnnnnnnnnnnnnnnnnnnnnnnnnnnnnnnnnnnnnnnnnnnnnnnnnnnnnnnnnnnnnnnnnnnnnnnnnnnnnnnnnnnnnnnnnnnnnnnnnnnnnnnnnnnnnnnnnnnnnnnnnnnnnnnnnnnnnnnnnnnnnnnnnnnnnnnnnnnnnnnnnnnnnnnnnnnnnnnnnnnnnnnnnnnnnnnnnnnnnnnnnnnnnnnnnnnnnnnnnnnnnnnnnnnnnnnnnnnnnnnnnnnnnnnnnnnnnnnnnnnnnnnnnnnnnnnnnnnnnnnnnnnnnnnnnnnnnnnnnnnnnnnnnnnnnnnnnnnnnnnnnnnnnnnnnnnnnnnnnnnnnnnnnnnnnnnnnnnnnnnnnnnnnnnnnnnnnnnnnnnnnnnnnnnnnnnnnnnnnnnnnnnnnnnnnnnnnnnnnnnnnnnnnnnnnnnnnnnnnnnnnnnnnnnnnnnnnnnnnnnnnnnnnnnnnnnnnnnnnnnnnnnnnnnnnnnnnnnnnnnnnnnnnnnnnnnnnnnnnnnnnnnnnnnnnnnnnnnnnnnnnnnnnnnnnnnnnnnnnnnnnnnnnnnnnnnnnnnnnnnnnnnnnnnnnnnnnnnnnnnnnnnnnnnnnnnnnnnnnnnnnnnnnnnnnnnnnnnnnnnnnnnnnnnnnnnnnnnnnnnnnnnnnnnnnnnnnnnnnnnnnnnnnnnnnnnnnnnnnnnnnnnnnnnnnnnnnnnnnnnnnnnnnnnnnnnnnnnnnnnnnnnnnnnnnnnnnnnnnnnnnnnnnnnnnnnnnnnnnnnnnnnnnnnnnnnnnnnnnnnnnnnnnnnnnnnnnnnnnnnnnnnnnnnnnnnnnnnnnnnnnnnnnnnnnnnnnnnnnnnnnnnnnnnnnnnnnnnnnnnnnnnnnnnnnnnnnnnnnnnnnnnnnnnnnnnnnnnnnnnnnnnnnnnnnnnnnnnnnnnnnnnnnnnnnnnnnnnnnnnnnnnnnnnnnnnnnnnnnnnnnnnnnnnnnnnnnnnnnnnnnnnnnnnnnnnnnnnnnnnnnnnnnnnnnnnnnnnnnnnnnnnnnnnnnnnnnnnnnnnnnnnnnnnnnnnnnnnnnnnnnnnnnnnnnnnnnnnnnnnnnnnnnnnnnnnnnnnnnnnnnnnnnnnnnnnnnnnnnnnnnnnnnnnnnnnnnnnnnnnnnnnnnnnnnnnnnnnnnnnnnnnnnnnnnnnnnnnnnnnnnnnnnnnnnnnnnnnnnnnnnnnnnnnnnnnnnnnnnnnnnnnnnnnnnnnnnnnnnnnnnnnnnnnnnnnnnnnnnnnnnnnnnnnnnnnnnnnnnnnnnnnnnnnnnnnnnnnnnnnnnnnnnnnnnnnnnnnnnnnnnnnnnnnnnnnnnnnnnnnnnnnnnnnnnnnnnnnnnnnnnnnnnnnnnnnnnnnnnnnnnnnnnnnnnnnnnnnnnnnnnnnnnnnnnnnnnnnnnnnnnnnnnnnnnnnnnnnnnnnnnnnnnnnnnnnnnnnnnnnnnnnnnnnnnnnnnnnnnnnnnnnnnnnnnnnnnnnnnnnnnnnnnnnnnnnnnnnnnnnnnnnnnnnnnnnnnnnnnnnnnnnnnnnnnnnnnnnnnnnnnnnnnnnnnnnnnnnnnnnnnnnnnnnnnnnnnnnnnnnnnnnnnnnnnnnnnnnnnnnnnnnnnnnnnnnnnnnnnnnnnnnnnnnnnnnnnnnnnnnnnnnnnnnnnnnnnnnnnnnnnnnnnnnnnnnnnnnnnnnnnnnnnnnnnnnnnnnnnnnnnnnnnnnnnnnnnnnnnnnnnnnnnnnnnnnnnnnnnnnnnnnnnnnnnnnnnnnnnnnnnnnnnnnnnnnnnnnnnnnnnnnnnnnnnnnnnnnnnnnnnnnnnnnnnnnnnnnnnnnnnnnnnnnnnnnnnnnnnnnnnnnnnnnnnnnnnnnnnnnnnnnnnnnnnnnnnnnnnnnnnnnnnnnnnnnnnnnnnnnnnnnnnnnnnnnnnnnnnnnnnnnnnnnnnnnnnnnnnnnnnnnnnnnnnnnnnnnnnnnnnnnnnnnnnnnnnnnnnnnnnnnnnnnnnnnnnnnnnnnnnnnnnnnnnnnnnnnnnnnnnnnnnnnnnnnnnnnnnnnnnnnnnnnnnnnnnnnnnnnnnnnnnnnnnnnnnnnnnnnnnnnnnnnnnnnnnnnnnnnnnnnnnnnnnnnnnnnnnnnnnnnnnnnnnnnnnnnnnnnnnnnnnnnnnnnnnnnnnnnnnnnnnnnnnnnnnnnnnnnnnnnnnnnnnnnnnnnnnnnnnnnnnnnnnnnnnnnnnnnnnnnnnnnnnnnnnnnnnnnnnnnnnnnnnnnnnnnnnnnnnnnnnnnnnnnnnnnnnnnnnnnnnnnnnnnnnnnnnnnnnnnnnnnnnnnnnnnnnnnnnnnnnnnnnnnnnnnnnnnnnnnnnnnnnnnnnnnnnnnnnnnnnnnnnnnnnnnnnnnnnnnnnnnnnnnnnnnnnnnnnnnnnnnnnnnnnnnnnnnnnnnnnnnnnnnnnnnnnnnnnnnnnnnnnnnnnnnnnnnnnnnnnnnnnnnnnnnnnnnnnnnnnnnnnnnnnnnnnnnnnnnnnnnnnnnnnnnnnnnnnnnnnnnnnnnnnnnnnnnnnnnnnnnnnnnnnnnnnnnnnnnnnnnnnnnnnnnnnnnnnnnnnnnnnnnnnnnnnnnnnnnnnnnnnnnnnnnnnnnnnnnnnnnnnnnnnnnnnnnnnnnnnnnnnnnnnnnnnnnnnnnnnnnnnnnnnnnnnnnnnnnnnnnnnnnnnnnnnnnnnnnnnnnnnnnnnnnnnnnnnnnnnnnnnnnnnnnnnnnnnnnnnnnnnnnnnnnnnnnnnnnnnnnnnnnnnnnnnnnnnnnnnnnnnnnnnnnnnnnnnnnnnnnnnnnnnnnnnnnnnnnnnnnnnnnnnnnnnnnnnnnnnnnnnnnnnnnnnnnnnnnnnnnnnnnnnnnnnnnnnnnnnnnnnnnnnnnnnnnnnnnnnnnnnnnnnnnnnnnnnnnnnnnnnnnnnnnnnnnnnnnnnnnnnnnnnnnnnnnnnnnnnnnnnnnnnnnnnnnnnnnnnnnnnnnnnnnnnnnnnnnnnnnnnnnnnnnnnnnnnnnnnnnnnnnnnnnnnnnnnnnnnnnnnnnnnnnnnnnnnnnnnnnnnnnnnnnnnnnnnnnnnnnnnnnnnnnnnnnnnnnnnnnnnnnnnnnnnnnnnnnnnnnnnnnnnnnnnnnnnnnnnnnnnnnnnnnnnnnnnnnnnnnnnnnnnnnnnnnnnnnnnnnnnnnnnnnnnnnnnnnnnnnnnnnnnnnnnnnnnnnnnnnnnnnnnnnnnnnnnnnnnnnnnnnnnnnnnnnnnnnnnnnnnnnnnnnnnnnnnnnnnnnnnnnnnnnnnnnnnnnnnnnnnnnnnnnnnnnnnnnnnnnnnnnnnnnnnnnnnnnnnnnnnnnnnnnnnnnnnnnnnnnnnnnnnnnnnnnnnnnnnnnnnnnnnnnnnnnnnnnnnnnnnnnnnnnnnnnnnnnnnnnnnnnnnnnnnnnnnnnnnnnnnnnnnnnnnnnnnnnnnnnnnnnnnnnnnnnnnnnnnnnnnnnnnnnnnnnnnnnnnnnnnnnnnnnnnnnnnnnnnnnnnnnnnnnnnnnnnnnnnnnnnnnnnnnnnnnnnnnnnnnnnnnnnnnnnnnnnnnnnnnnnnnnnnnnnnnnnnnnnnnnnnnnnnnnnnnnnnnnnnnnnnnnnnnnnnnnnnnnnnnnnnnnnnnnnnnnnnnnnnnnnnnnnnnnnnnnnnnnnnnnnnnnnnnnnnnnnnnnnnnnnnnnnnnnnnnnnnnnnnnnnnnnnnnnnnnnnnnnnnnnnnnnnnnnnnnnnnnnnnnnnnnnnnnnnnnnnnnnnnnnnnnnnnnnnnnnnnnnnnnnnnnnnnnnnnnnnnnnnnnnnnnnnnnnnnnnnnnnnnnnnnnnnnnnnnnnnnnnnnnnnnnnnnnnnnnnnnnnnnnnnnnnnnnnnnnnnnnnnnnnnnnnnnnnnnnnnnnnnnnnnnnnnnnnnnnnnnnnnnnnnnnnnnnnnnnnnnnnnnnnnnnnnnnnnnnnnnnnnnnnnnnnnnnnnnnnnnnnnnnnnnnnnnnnnnnnnnnnnnnnnnnnnnnnnnnnnnnnnnnnnnnnnnnnnnnnnnnnnnnnnnnnnnnnnnnnnnnnnnnnnnnnnnnnnnnnnnnnnnnnnnnnnnnnnnnnnnnnnnnnnnnnnnnnnnnnnnnnnnnnnnnnnnnnnnnnnnnnnnnnnnnnnnnnnnnnnnnnnnnnnnnnnnnnnnnnnnnnnnnnnnnnnnnnnnnnnnnnnnnnnnnnnnnnnnnnnnnnnnnnnnnnnnnnnnnnnnnnnnnnnnnnnnnnnnnnnnnnnnnnnnnnnnnnnnnnnnnnnnnnnnnnnnnnnnnnnnnnnnnnnnnnnnnnnnnnnnnnnnnnnnnnnnnnnnnnnnnnnnnnnnnnnnnnnnnnnnnnnnnnnnnnnnnnnnnnnnnnnnnnnnnnnnnnnnnnnnnnnnnnnnnnnnnnnnnnnnnnnnnnnnnnnnnnnnnnnnnnnnnnnnnnnnnnnnnnnnnnnnnnnnnnnnnnnnnnnnnnnnnnnnnnnnnnnnnnnnnnnnnnnnnnnnnnnnnnnnnnnnnnnnnnnnnnnnnnnnnnnnnnnnnnnnnnnnnnnnnnnnnnnnnnnnnnnnnnnnnnnnnnnnnnnnnnnnnnnnnnnnnnnnnnnnnnnnnnnnnnnnnnnnnnnnnnnnnnnnnnnnnnnnnnnnnnnnnnnnnnnnnnnnnnnnnnnnnnnnnnnnnnnnnnnnnnnnnnnnnnnnnnnnnnnnnnnnnnnnnnnnnnnnnnnnnnnnnnnnnnnnnnnnnnnnnnnnnnnnnnnnnnnnnnnnnnnnnnnnnnnnnnnnnnnnnnnnnnnnnnnnnnnnnnnnnnnnnnnnnnnnnnnnnnnnnnnnnnnnnnnnnnnnnnnnnnnnnnnnnnnnnnnnnnnnnnnnnnnnnnnnnnnnnnnnnnnnnnnnnnnnnnnnnnnnnnnnnnnnnnnnnnnnnnnnnnnnnnnnnnnnnnnnnnnnnnnnnnnnnnnnnnnnnnnnnnnnnnnnnnnnnnnnnnnnnnnnnnnnnnnnnnnnnnnnnnnnnnnnnnnnnnnnnnnnnnnnnnnnnnnnnnnnnnnnnnnnnnnnnnnnnnnnnnnnnnnnnnnnnnnnnnnnnnnnnnnnnnnnnnnnnnnnnnnnnnnnnnnnnnnnnnnnnnnnnnnnnnnnnnnnnnnnnnnnnnnnnnnnnnnnnnnnnnnnnnnnnnnnnnnnnnnnnnnnnnnnnnnnnnnnnnnnnnnnnnnnnnnnnnnnnnnnnnnnnnnnnnnnnnnnnnnnnnnnnnnnnnnnnnnnnnnnnnnnnnnnnnnnnnnnnnnnnnnnnnnnnnnnnnnnnnnnnnnnnnnnnnnnnnnnnnnnnnnnnnnnnnnnnnnnnnnnnnnnnnnnnnnnnnnnnnnnnnnnnnnnnnnnnnnnnnnnnnnnnnnnnnnnnnnnnnnnnnnnnnnnnnnnnnnnnnnnnnnnnnnnnnnnnnnnnnnnnnnnnnnnnnnnnnnnnnnnnnnnnnnnnnnnnnnnnnnnnnnnnnnnnnnnnnnnnnnnnnnnnnnnnnnnnnnnnnnnnnnnnnnnnnnnnnnnnnnnnnnnnnnnnnnnnnnnnnnnnnnnnnnnnnnnnnnnnnnnnnnnnnnnnnnnnnnnnnnnnnnnnnnnnnnnnnnnnnnnnnnnnnnnnnnnnnnnnnnnnnnnnnnnnnnnnnnnnnnnnnnnnnnnnnnnnnnnnnnnnnnnnnnnnnnnnnnnnnnnnnnnnnnnnnnnnnnnnnnnnnnnnnnnnnnnnnnnnnnnnnnnnnnnnnnnnnnnnnnnnnnnnnnnnnnnnnnnnnnnnnnnnnnnnnnnnnnnnnnnnnnnnnnnnnnnnnnnnnnnnnnnnnnnnnnnnnnnnnnnnnnnnnnnnnnnnnnnnnnnnnnnnnnnnnnnnnnnnnnnnnnnnnnnnnnnnnnnnnnnnnnnnnnnnnnnnnnnnnnnnnnnnnnnnnnnnnnnnnnnnnnnnnnnnnnnnnnnnnnnnnnnnnnnnnnnnnnnnnnnnnnnnnnnnnnnnnnnnnnnnnnnnnnnnnnnnnnnnnnnnnnnnnnnnnnnnnnnnnnnnnnnnnnnnnnnnnnnnnnnnnnnnnnnnnnnnnnnnnnnnnnnnnnnnnnnnnnnnnnnnnnnnnnnnnnnnnnnnnnnnnnnnnnnnnnnnnnnnnnnnnnnnnnnnnnnnnnnnnnnnnnnnnnnnnnnnnnnnnnnnnnnnnnnnnnnnnnnnnnnnnnnnnnnnnnnnnnnnnnnnnnnnnnnnnnnnnnnnnnnnnnnnnnnnnnnnnnnnnnnnnnnnnnnnnnnnnnnnnnnnnnnnnnnnnnnnnnnnnnnnnnnnnnnnnnnnnnnnnnnnnnnnnnnnnnnnnnnnnnnnnnnnnnnnnnnnnnnnnnnnnnnnnnnnnnnnnnnnnnnnnnnnnnnnnnnnnnnnnnnnnnnnnnnnnnnnnnnnnnnnnnnnnnnnnnnnnnnnnnnnnnnnnnnnnnnnnnnnnnnnnnnnnnnnnnnnnnnnnnnnnnnnnnnnnnnnnnnnnnnnnnnnnnnnnnnnnnnnnnnnnnnnnnnnnnnnnnnnnnnnnnnnnnnnnnnnnnnnnnnnnnnnnnnnnnnnnnnnnnnnnnnnnnnnnnnnnnnnnnnnnnnnnnnnnnnnnnnnnnnnnnnnnnnnnnnnnnnnnnnnnnnnnnnnnnnnnnnnnnnnnnnnnnnnnnnnnnnnnnnnnnnnnnnnnnnnnnnnnnnnnnnnnnnnnnnnnnnnnnnnnnnnnnnnnnnnnnnnnnnnnnnnnnnnnnnnnnnnnnnnnnnnnnnnnnnnnnnnnnnnnnnnnnnnnnnnnnnnnnnnnnnnnnnnnnnnnnnnnnnnnnnnnnnnnnnnnnnnnnnnnnnnnnnnnnnnnnnnnnnnnnnnnnnnnnnnnnnnnnnnnnnnnnnnnnnnnnnnnnnnnnnnnnnnnnnnnnnnnnnnnnnnnnnnnnnnnnnnnnnnnnnnnnnnnnnnnnnnnnnnnnnnnnnnnnnnnnnnnnnnnnnnnnnnnnnnnnnnnnnnnnnnnnnnnnnnnnnnnnnnnnnnnnnnnnnnnnnnnnnnnnnnnnnnnnnnnnnnnnnnnnnnnnnnnnnnnnnnnnnnnnnnnnnnnnnnnnnnnnnnnnnnnnnnnnnnnnnnnnnnnnnnnnnnnnnnnnnnnnnnnnnnnnnnnnnnnnnnnnnnnnnnnnnnnnnnnnnnnnnnnnnnnnnnnnnnnnnnnnnnnnnnnnnnnnnnnnnnnnnnnnnnnnnnnnnnnnnnnnnnnnnnnnnnnnnnnnnnnnnnnnnnnnnnnnnnnnnnnnnnnnnnnnnnnnnnnnnnnnnnnnnnnnnnnnnnnnnnnnnnnnnnnnnnnnnnnnnnnnnnnnnnnnnnnnnnnnnnnnnnnnnnnnnnnnnnnnnnnnnnnnnnnnnnnnnnnnnnnnnnnnnnnnnnnnnnnnnnnnnnnnnnnnnnnnnnnnnnnnnnnnnnnnnnnnnnnnnnnnnnnnnnnnnnnnnnnnnnnnnnnnnnnnnnnnnnnnnnnnnnnnnnnnnnnnnnnnnnnnnnnnnnnnnnnnnnnnnnnnnnnnnnnnnnnnnnnnnnnnnnnnnnnnnnnnnnnnnnnnnnnnnnnnnnnnnnnnnnnnnnnnnnnnnnnnnnnnnnnnnnnnnnnnnnnnnnnnnnnnnnnnnnnnnnnnnnnnnnnnnnnnnnnnnnnnnnnnnnnnnnnnnnnnnnnnnnnnnnnnnnnnnnnnnnnnnnnnnnnnnnnnnnnnnnnnnnnnnnnnnnnnnnnnnnnnnnnnnnnnnnnnnnnnnnnnnnnnnnnnnnnnnnnnnnnnnnnnnnnnnnnnnnnnnnnnnnnnnnnnnnnnnnnnnnnnnnnnnnnnnnnnnnnnnnnnnnnnnnnnnnnnnnnnnnnnnnnnnnnnnnnnnnnnnnnnnnnnnnnnnnnnnnnnnnnnnnnnnnnnnnnnnnnnnnnnnnnnnnnnnnnnnnnnnnnnnnnnnnnnnnnnnnnnnnnnnnnnnnnnnnnnnnnnnnnnnnnnnnnnnnnnnnnnnnnnnnnnnnnnnnnnnnnnnnnnnnnnnnnnnnnnnnnnnnnnnnnnnnnnnnnnnnnnnnnnnnnnnnnnnnnnnnnnnnnnnnnnnnnnnnnnnnnnnnnnnnnnnnnnnnnnnnnnnnnnnnnnnnnnnnnnnnnnnnnnnnnnnnnnnnnnnnnnnnnnnnnnnnnnnnnnnnnnnnnnnnnnnnnnnnnnnnnnnnnnnnnnnnnnnnnnnnnnnnnnnnnnnnnnnnnnnnnnnnnnnnnnnnnnnnnnnnnnnnnnnnnnnnnnnnnnnnnnnnnnnnnnnnnnnnnnnnnnnnnnnnnnnnnnnnnnnnnnnnnnnnnnnnnnnnnnnnnnnnnnnnnnnnnnnnnnnnnnnnnnnnnnnnnnnnnnnnnnnnnnnnnnnnnnnnnnnnnnnnnnnnnnnnnnnnnnnnnnnnnnnnnnnnnnnnnnnnnnnnnnnnnnnnnnnnnnnnnnnnnnnnnnnnnnnnnnnnnnnnnnnnnnnnnnnnnnnnnnnnnnnnnnnnnnnnnnnnnnnnnnnnnnnnnnnnnnnnnnnnnnnnnnnnnnnnnnnnnnnnnnnnnnnnnnnnnnnnnnnnnnnnnnnnnnnnnnnnnnnnnnnnnnnnnnnnnnnnnnnnnnnnnnnnnnnnnnnnnnnnnnnnnnnnnnnnnnnnnnnnnnnnnnnnnnnnnnnnnnnnnnnnnnnnnnnnnnnnnnnnnnnnnnnnnnnnnnnnnnnnnnnnnnnnnnnnnnnnnnnnnnnnnnnnnnnnnnnnnnnnnnnnnnnnnnnnnnnnnnnnnnnnnnnnnnnnnnnnnnnnnnnnnnnnnnnnnnnnnnnnnnnnnnnnnnnnnnnnnnnnnnnnnnnnnnnnnnnnnnnnnnnnnnnnnnnnnnnnnnnnnnnnnnnnnnnnnnnnnnnnnnnnnnnnnnnnnnnnnnnnnnnnnnnnnnnnnnnnnnnnnnnnnnnnnnnnnnnnnnnnnnnnnnnnnnnnnnnnnnnnnnnnnnnnnnnnnnnnnnnnnnnnnnnnnnnnnnnnnnnnnnnnnnnnnnnnnnnnnnnnnnnnnnnnnnnnnnnnnnnnnnnnnnnnnnnnnnnnnnnnnnnnnnnnnnnnnnnnnnnnnnnnnnnnnnnnnnnnnnnnnnnnnnnnnnnnnnnnnnnnnnnnnnnnnnnnnnnnnnnnnnnnnnnnnnnnnnnnnnnnnnnnnnnnnnnnnnnnnnnnnnnnnnnnnnnnnnnnnnnnnnnnnnnnnnnnnnnnnnnnnnnnnnnnnnnnnnnnnnnnnnnnnnnnnnnnnnnnnnnnnnnnnnnnnnnnnnnnnnnnnnnnnnnnnnnnnnnnnnnnnnnnnnnnnnnnnnnnnnnnnnnnnnnnnnnnnnnnnnnnnnnnnnnnnnnnnnnnnnnnnnnnnnnnnnnnnnnnnnnnnnnnnnnnnnnnnnnnnnnnnnnnnnnnnnnnnnnnnnnnnnnnnnnnnnnnnnnnnnnnnnnnnnnnnnnnnnnnnnnnnnnnnnnnnnnnnnnnnnnnnnnnnnnnnnnnnnnnnnnnnnnnnnnnnnnnnnnnnnnnnnnnnnnnnnnnnnnnnnnnnnnnnnnnnnnnnnnnnnnnnnnnnnnnnnnnnnnnnnnnnnnnnnnnnnnnnnnnnnnnnnnnnnnnnnnnnnnnnnnnnnnnnnnnnnnnnnnnnnnnnnnnnnnnnnnnnnnnnnnnnnnnnnnnnnnnnnnnnnnnnnnnnnnnnnnnnnnnnnnnnnnnnnnnnnnnnnnnnnnnnnnnnnnnnnnnnnnnnnnnnnnnnnnnnnnnnnnnnnnnnnnnnnnnnnnnnnnnnnnnnnnnnnnnnnnnnnnnnnnnnnnnnnnnnnnnnnnnnnnnnnnnnnnnnnnnnnnnnnnnnnnnnnnnnnnnnnnnnnnnnnnnnnnnnnnnnnnnnnnnnnnnnnnnnnnnnnnnnnnnnnnnnnnnnnnnnnnnnnnnnnnnnnnnnnnnnnnnnnnnnnnnnnnnnnnnnnnnnnnnnnnnnnnnnnnnnnnnnnnnnnnnnnnnnnnnnnnnnnnnnnnnnnnnnnnnnnnnnnnnnnnnnnnnnnnnnnnnnnnnnnnnnnnnnnnnnnnnnnnnnnnnnnnnnnnnnnnnnnnnnnnnnnnnnnnnnnnnnnnnnnnnnnnnnnnnnnnnnnnnnnnnnnnnnnnnnnnnnnnnnnnnnnnnnnnnnnnnnnnnnnnnnnnnnnnnnnnnnnnnnnnnnnnnnnnnnnnnnnnnnnnnnnnnnnnnnnnnnnnnnnnnnnnnnnnnnnnnnnnnnnnnnnnnnnnnnnnnnnnnnnnnnnnnnnnnnnnnnnnnnnnnnnnnnnnnnnnnnnnnnnnnnnnnnnnnnnnnnnnnnnnnnnnnnnnnnnnnnnnnnnnnnnnnnnnnnnnnnnnnnnnnnnnnnnnnnnnnnnnnnnnnnnnnnnnnnnnnnnnnnnnnnnnnnnnnnnnnnnnnnnnnnnnnnnnnnnnnnnnnnnnnnnnnnnnnnnnnnnnnnnnnnnnnnnnnnnnnnnnnnnnnnnnnnnnnnnnnnnnnnnnnnnnnnnnnnnnnnnnnnnnnnnnnnnnnnnnnnnnnnnnnnnnnnnnnnnnnnnnnnnnnnnnnnnnnnnnnnnnnnnnnnnnnnnnnnnnnnnnnnnnnnnnnnnnnnnnnnnnnnnnnnnnnnnnnnnnnnnnnnnnnnnnnnnnnnnnnnnnnnnnnnnnnnnnnnnnnnnnnnnnnnnnnnnnnnnnnnnnnnnnnnnnnnnnnnnnnnnnnnnnnnnnnnnnnnnnnnnnnnnnnnnnnnnnnnnnnnnnnnnnnnnnnnnnnnnnnnnnnnnnnnnnnnnnnnnnnnnnnnnnnnnnnnnnnnnnnnnnnnnnnnnnnnnnnnnnnnnnnnnnnnnnnnnnnnnnnnnnnnnnnnnnnnnnnnnnnnnnnnnnnnnnnnnnnnnnnnnnnnnnnnnnnnnnnnnnnnnnnnnnnnnnnnnnnnnnnnnnnnnnnnnnnnnnnnnnnnnnnnnnnnnnnnnnnnnnnnnnnnnnnnnnnnnnnnnnnnnnnnnnnnnnnnnnnnnnnnnnnnnnnnnnnnnnnnnnnnnnnnnnnnnnnnnnnnnnnnnnnnnnnnnnnnnnnnnnnnnnnnnnnnnnnnnnnnnnnnnnnnnnnnnnnnnnnnnnnnnnnnnnnnnnnnnnnnnnnnnnnnnnnnnnnnnnnnnnnnnnnnnnnnnnnnnnnnnnnnnnnnnnnnnnnnnnnnnnnnnnnnnnnnnnnnnnnnnnnnnnnnnnnnnnnnnnnnnnnnnnnnnnnnnnnnnnnnnnnnnnnnnnnnnnnnnnnnnnnnnnnnnnnnnnnnnnnnnnnnnnnnnnnnnnnnnnnnnnnnnnnnnnnnnnnnnnnnnnnnnnnnnnnnnnnnnnnnnnnnnnnnnnnnnnnnnnnnnnnnnnnnnnnnnnnnnnnnnnnnnnnnnnnnnnnnnnnnnnnnnnnnnnnnnnnnnnnnnnnnnnnnnnnnnnnnnnnnnnnnnnnnnnnnnnnnnnnnnnnnnnnnnnnnnnnnnnnnnnnnnnnnnnnnnnnnnnnnnnnnnnnnnnnnnnnnnnnnnnnnnnnnnnnnnnnnnnnnnnnnnnnnnnnnnnnnnnnnnnnnnnnnnnnnnnnnnnnnnnnnnnnnnnnnnnnnnnnnnnnnnnnnnnnnnnnnnnnnnnnnnnnnnnnnnnnnnnnnnnnnnnnnnnnnnnnnnnnnnnnnnnnnnnnnnnnnnnnnnnnnnnnnnnnnnnnnnnnnnnnnnnnnnnnnnnnnnnnnnnnnnnnnnnnnnnnnnnnnnnnnnnnnnnnnnnnnnnnnnnnnnnnnnnnnnnnnnnnnnnnnnnnnnnnnnnnnnnnnnnnnnnnnnnnnnnnnnnnnnnnnnnnnnnnnnnnnnnnnnnnnnnnnnnnnnnnnnnnnnnnnnnnnnnnnnnnnnnnnnnnnnnnnnnnnnnnnnnnnnnnnnnnnnnnnnnnnnnnnnnnnnnnnnnnnnnnnnnnnnnnnnnnnnnnnnnnnnnnnnnnnnnnnnnnnnnnnnnnnnnnnnnnnnnnnnnnnnnnnnnnnnnnnnnnnnnnnnnnnnnnnnnnnnnnnnnnnnnnnnnnnnnnnnnnnnnnnnnnnnnnnnnnnnnnnnnnnnnnnnnnnnnnnnnnnnnnnnnnnnnnnnnnnnnnnnnnnnnnnnnnnnnnnnnnnnnnnnnnnnnnnnnnnnnnnnnnnnnnnnnnnnnnnnnnnnnnnnnnnnnnnnnnnnnnnnnnnnnnnnnnnnnnnnnnnnnnnnnnnnnnnnnnnnnnnnnnnnnnnnnnnnnnnnnnnnnnnnnnnnnnnnnnnnnnnnnnnnnnnnnnnnnnnnnnnnnnnnnnnnnnnnnnnnnnnnnnnnnnnnnnnnnnnnnnnnnnnnnnnnnnnnnnnnnnnnnnnnnnnnnnnnnnnnnnnnnnnnnnnnnnnnnnnnnnnnnnnnnnnnnnnnnnnnnnnnnnnnnnnnnnnnnnnnnnnnnnnnnnnnnnnnnnnnnnnnnnnnnnnnnnnnnnnnnnnnnnnnnnnnnnnnnnnnnnnnnnnnnnnnnnnnnnnnnnnnnnnnnnnnnnnnnnnnnnnnnnnnnnnnnnnnnnnnnnnnnnnnnnnnnnnnnnnnnnnnnnnnnnnnnnnnnnnnnnnnnnnnnnnnnnnnnnnnnnnnnnnnnnnnnnnnnnnnnnnnnnnnnnnnnnnnnnnnnnnnnnnnnnnnnnnnnnnnnnnnnnnnnnnnnnnnnnnnnnnnnnnnnnnnnnnnnnnnnnnnnnnnnnnnnnnnnnnnnnnnnnnnnnnnnnnnnnnnnnnnnnnnnnnnnnnnnnnnnnnnnnnnnnnnnnnnnnnnnnnnnnnnnnnnnnnnnnnnnnnnnnnnnnnnnnnnnnnnnnnnnnnnnnnnnnnnnnnnnnnnnnnnnnnnnnnnnnnnnnnnnnnnnnnnnnnnnnnnnnnnnnnnnnnnnnnnnnnnnnnnnnnnnnnnnnnnnnnnnnnnnnnnnnnnnnnnnnnnnnnnnnnnnnnnnnnnnnnnnnnnnnnnnnnnnnnnnnnnnnnnnnnnnnnnnnnnnnnnnnnnnnnnnnnnnnnnnnnnnnnnnnnnnnnnnnnnnnnnnnnnnnnnnnnnnnnnnnnnnnnnnnnnnnnnnnnnnnnnnnnnnnnnnnnnnnnnnnnnnnnnnnnnnnnnnnnnnnnnnnnnnnnnnnnnnnnnnnnnnnnnnnnnnnnnnnnnnnnnnnnnnnnnnnnnnnnnnnnnnnnnnnnnnnnnnnnnnnnnnnnnnnnnnnnnnnnnnnnnnnnnnnnnnnnnnnnnnnnnnnnnnnnnnnnnnnnnnnnnnnnnnnnnnnnnnnnnnnnnnnnnnnnnnnnnnnnnnnnnnnnnnnnnnnnnnnnnnnnnnnnnnnnnnnnnnnnnnnnnnnnnnnnnnnnnnnnnnnnnnnnnnnnnnnnnnnnnnnnnnnnnnnnnnnnnnnnnnnnnnnnnnnnnnnnnnnnnnnnnnnnnnnnnnnnnnnnnnnnnnnnnnnnnnnnnnnnnnnnnnnnnnnnnnnnnnnnnnnnnnnnnnnnnnnnnnnnnnnnnnnnnnnnnnnnnnnnnnnnnnnnnnnnnnnnnnnnnnnnnnnnnnnnnnnnnnnnnnnnnnnnnnnnnnnnnnnnnnnnnnnnnnnnnnnnnnnnnnnnnnnnnnnnnnnnnnnnnnnnnnnnnnnnnnnnnnnnnnnnnnnnnnnnnnnnnnnnnnnnnnnnnnnnnnnnnnnnnnnnnnnnnnnnnnnnnnnnnnnnnnnnnnnnnnnnnnnnnnnnnnnnnnnnnnnnnnnnnnnnnnnnnnnnnnnnnnnnnnnnnnnnnnnnnnnnnnnnnnnnnnnnnnnnnnnnnnnnnnnnnnnnnnnnnnnnnnnnnnnnnnnnnnnnnnnnnnnnnnnnnnnnnnnnnnnnnnnnnnnnnnnnnnnnnnnnnnnnnnnnnnnnnnnnnnnnnnnnnnnnnnnnnnnnnnnnnnnnnnnnnnnnnnnnnnnnnnnnnnnnnnnnnnnnnnnnnnnnnnnnnnnnnnnnnnnnnnnnnnnnnnnnnnnnnnnnnnnnnnnnnnnnnnnnnnnnnnnnnnnnnnnnnnnnnnnnnnnnnnnnnnnnnnnnnnnnnnnnnnnnnnnnnnnnnnnnnnnnnnnnnnnnnnnnnnnnnnnnnnnnnnnnnnnnnnnnnnnnnnnnnnnnnnnnnnnnnnnnnnnnnnnnnnnnnnnnnnnnnnnnnnnnnnnnnnnnnnnnnnnnnnnnnnnnnnnnnnnnnnnnnnnnnnnnnnnnnnnnnnnnnnnnnnnnnnnnnnnnnnnnnnnnnnnnnnnnnnnnnnnnnnnnnnnnnnnnnnnnnnnnnnnnnnnnnnnnnnnnnnnnnnnnnnnnnnnnnnnnnnnnnnnnnnnnnnnnnnnnnnnnnnnnnnnnnnnnnnnnnnnnnnnnnnnnnnnnnnnnnnnnnnnnnnnnnnnnnnnnnnnnnnnnnnnnnnnnnnnnnnnnnnnnnnnnnnnnnnnnnnnnnnnnnnnnnnnnnnnnnnnnnnnnnnnnnnnnnnnnnnnnnnnnnnnnnnnnnnnnnnnnnnnnnnnnnnnnnnnnnnnnnnnnnnnnnnnnnnnnnnnnnnnnnnnnnnnnnnnnnnnnnnnnnnnnnnnnnnnnnnnnnnnnnnnnnnnnnnnnnnnnnnnnnnnnnnnnnnnnnnnnnnnnnnnnnnnnnnnnnnnnnnnnnnnnnnnnnnnnnnnnnnnnnnnnnnnnnnnnnnnnnnnnnnnnnnnnnnnnnnnnnnnnnnnnnnnnnnnnnnnnnnnnnnnnnnnnnnnnnnnnnnnnnnnnnnnnnnnnnnnnnnnnnnnnnnnnnnnnnnnnnnnnnnnnnnnnnnnnnnnnnnnnnnnnnnnnnnnnnnnnnnnnnnnnnnnnnnnnnnnnnnnnnnnnnnnnnnnnnnnnnnnnnnnnnnnnnnnnnnnnnnnnnnnnnnnnnnnnnnnnnnnnnnnnnnnnnnnnnnnnnnnnnnnnnnnnnnnnnnnnnnnnnnnnnnnnnnnnnnnnnnnnnnnnnnnnnnnnnnnnnnnnnnnnnnnnnnnnnnnnnnnnnnnnnnnnnnnnnnnnnnnnnnnnnnnnnnnnnnnnnnnnnnnnnnnnnnnnnnnnnnnnnnnnnnnnnnnnnnnnnnnnnnnnnnnnnnnnnnnnnnnnnnnnnnnnnnnnnnnnnnnnnnnnnnnnnnnnnnnnnnnnnnnnnnnnnnnnnnnnnnnnnnnnnnnnnnnnnnnnnnnnnnnnnnnnnnnnnnnnnnnnnnnnnnnnnnnnnnnnnnnnnnnnnnnnnnnnnnnnnnnnnnnnnnnnnnnnnnnnnnnnnnnnnnnnnnnnnnnnnnnnnnnnnnnnnnnnnnnnnnnnnnnnnnnnnnnnnnnnnnnnnnnnnnnnnnnnnnnnnnnnnnnnnnnnnnnnnnnnnnnnnnnnnnnnnnnnnnnnnnnnnnnnnnnnnnnnnnnnnnnnnnnnnnnnnnnnnnnnnnnnnnnnnnnnnnnnnnnnnnnnnnnnnnnnnnnnnnnnnnnnnnnnnnnnnnnnnnnnnnnnnnnnnnnnnnnnnnnnnnnnnnnnnnnnnnnnnnnnnnnnnnnnnnnnnnnnnnnnnnnnnnnnnnnnnnnnnnnnnnnnnnnnnnnnnnnnnnnnnnnnnnnnnnnnnnnnnnnnnnnnnnnnnnnnnnnnnnnnnnnnnnnnnnnnnnnnnnnnnnnnnnnnnnnnnnnnnnnnnnnnnnnnnnnnnnnnnnnnnnnnnnnnnnnnnnnnnnnnnnnnnnnnnnnnnnnnnnnnnnnnnnnnnnnnnnnnnnnnnnnnnnnnnnnnnnnnnnnnnnnnnnnnnnnnnnnnnnnnnnnnnnnnnnnnnnnnnnnnnnnnnnnnnnnnnnnnnnnnnnnnnnnnnnnnnnnnnnnnnnnnnnnnnnnnnnnnnnnnnnnnnnnnnnnnnnnnnnnnnnnnnnnnnnnnnnnnnnnnnnnnnnnnnnnnnnnnnnnnnnnnnnnnnnnnnnnnnnnnnnnnnnnnnnnnnnnnnnnnnnnnnnnnnnnnnnnnnnnnnnnnnnnnnnnnnnnnnnnnnnnnnnnnnnnnnnnnnnnnnnnnnnnnnnnnnnnnnnnnnnnnnnnnnnnnnnnnnnnnnnnnnnnnnnnnnnnnnnnnnnnnnnnnnnnnnnnnnnnnnnnnnnnnnnnnnnnnnnnnnnnnnnnnnnnnnnnnnnnnnnnnnnnnnnnnnnnnnnnnnnnnnnnnnnnnnnnnnnnnnnnnnnnnnnnnnnnnnnnnnnnnnnnnnnnnnnnnnnnnnnnnnnnnnnnnnnnnnnnnnnnnnnnnnnnnnnnnnnnnnnnnnnnnnnnnnnnnnnnnnnnnnnnnnnnnnnnnnnnnnnnnnnnnnnnnnnnnnnnnnnnnnnnnnnnnnnnnnnnnnnnnnnnnnnnnnnnnnnnnnnnnnnnnnnnnnnnnnnnnnnnnnnnnnnnnnnnnnnnnnnnnnnnnnnnnnnnnnnnnnnnnnnnnnnnnnnnnnnnnnnnnnnnnnnnnnnnnnnnnnnnnnnnnnnnnnnnnnnnnnnnnnnnnnnnnnnnnnnnnnnnnnnnnnnnnnnnnnnnnnnnnnnnnnnnnnnnnnnnnnnnnnnnnnnnnnnnnnnnnnnnnnnnnnnnnnnnnnnnnnnnnnnnnnnnnnnnnnnnnnnnnnnnnnnnnnnnnnnnnnnnnnnnnnnnnnnnnnnnnnnnnnnnnnnnnnnnnnnnnnnnnnnnnnnnnnnnnnnnnnnnnnnnnnnnnnnnnnnnnnnnnnnnnnnnnnnnnnnnnnnnnnnnnnnnnnnnnnnnnnnnnnnnnnnnnnnnnnnnnnnnnnnnnnnnnnnnnnnnnnnnnnnnnnnnnnnnnnnnnnnnnnnnnnnnnnnnnnnnnnnnnnnnnnnnnnnnnnnnnnnnnnnnnnnnnnnnnnnnnnnnnnnnnnnnnnnnnnnnnnnnnnnnnnnnnnnnnnnnnnnnnnnnnnnnnnnnnnnnnnnnnnnnnnnnnnnnnnnnnnnnnnnnnnnnnnnnnnnnnnnnnnnnnnnnnnnnnnnnnnnnnnnnnnnnnnnnnnnnnnnnnnnnnnnnnnnnnnnnnnnnnnnnnnnnnnnnnnnnnnnnnnnnnnnnnnnnnnnnnnnnnnnnnnnnnnnnnnnnnnnnnnnnnnnnnnnnnnnnnnnnnnnnnnnnnnnnnnnnnnnnnnnnnnnnnnnnnnnnnnnnnnnnnnnnnnnnnnnnnnnnnnnnnnnnnnnnnnnnnnnnnnnnnnnnnnnnnnnnnnnnnnnnnnnnnnnnnnnnnnnnnnnnnnnnnnnnnnnnnnnnnnnnnnnnnnnnnnnnnnnnnnnnnnnnnnnnnnnnnnnnnnnnnnnnnnnnnnnnnnnnnnnnnnnnnnnnnnnnnnnnnnnnnnnnnnnnnnnnnnnnnnnnnnnnnnnnnnnnnnnnnnnnnnnnnnnnnnnnnnnnnnnnnnnnnnnnnnnnnnnnnnnnnnnnnnnnnnnnnnnnnnnnnnnnnnnnnnnnnnnnnnnnnnnnnnnnnnnnnnnnnnnnnnnnnnnnnnnnnnnnnnnnnnnnnnnnnnnnnnnnnnnnnnnnnnnnnnnnnnnnnnnnnnnnnnnnnnnnnnnnnnnnnnnnnnnnnnnnnnnnnnnnnnnnnnnnnnnnnnnnnnnnnnnnnnnnnnnnnnnnnnnnnnnnnnnnnnnnnnnnnnnnnnnnnnnnnnnnnnnnnnnnnnnnnnnnnnnnnnnnnnnnnnnnnnnnnnnnnnnnnnnnnnnnnnnnnnnnnnnnnnnnnnnnnnnnnnnnnnnnnnnnnnnnnnnnnnnnnnnnnnnnnnnnnnnnnnnnnnnnnnnnnnnnnnnnnnnnnnnnnnnnnnnnnnnnnnnnnnnnnnnnnnnnnnnnnnnnnnnnnnnnnnnnnnnnnnnnnnnnnnnnnnnnnnnnnnnnnnnnnnnnnnnnnnnnnnnnnnnnnnnnnnnnnnnnnnnnnnnnnnnnnnnnnnnnnnnnnnnnnnnnnnnnnnnnnnnnnnnnnnnnnnnnnnnnnnnnnnnnnnnnnnnnnnnnnnnnnnnnnnnnnnnnnnnnnnnnnnnnnnnnnnnnnnnnnnnnnnnnnnnnnnnnnnnnnnnnnnnnnnnnnnnnnnnnnnnnnnnnnnnnnnnnnnnnnnnnnnnnnnnnnnnnnnnnnnnnnnnnnnnnnnnnnnnnnnnnnnnnnnnnnnnnnnnnnnnnnnnnnnnnnnnnnnnnnnnnnnnnnnnnnnnnnnnnnnnnnnnnnnnnnnnnnnnnnnnnnnnnnnnnnnnnnnnnnnnnnnnnnnnnnnnnnnnnnnnnnnnnnnnnnnnnnnnnnnnnnnnnnnnnnnnnnnnnnnnnnnnnnnnnnnnnnnnnnnnnnnnnnnnnnnnnnnnnnnnnnnnnnnnnnnnnnnnnnnnnnnnnnnnnnnnnnnnnnnnnnnnnnnnnnnnnnnnnnnnnnnnnnnnnnnnnnnnnnnnnnnnnnnnnnnnnnnnnnnnnnnnnnnnnnnnnnnnnnnnnnnnnnnnnnnnnnnnnnnnnnnnnnnnnnnnnnnnnnnnnnnnnnnnnnnnnnnnnnnnnnnnnnnnnnnnnnnnnnnnnnnnnnnnnnnnnnnnnnnnnnnnnnnnnnnnnnnnnnnnnnnnnnnnnnnnnnnnnnnnnnnnnnnnnnnnnnnnnnnnnnnnnnnnnnnnnnnnnnnnnnnnnnnnnnnnnnnnnnnnnnnnnnnnnnnnnnnnnnnnnnnnnnnnnnnnnnnnnnnnnnnnnnnnnnnnnnnnnnnnnnnnnnnnnnnnnnnnnnnnnnnnnnnnnnnnnnnnnnnnnnnnnnnnnnnnnnnnnnnnnnnnnnnnnnnnnnnnnnnnnnnnnnnnnnnnnnnnnnnnnnnnnnnnnnnnnnnnnnnnnnnnnnnnnnnnnnnnnnnnnnnnnnnnnnnnnnnnnnnnnnnnnnnnnnnnnnnnnnnnnnnnnnnnnnnnnnnnnnnnnnnnnnnnnnnnnnnnnnnnnnnnnnnnnnnnnnnnnnnnnnnnnnnnnnnnnnnnnnnnnnnnnnnnnnnnnnnnnnnnnnnnnnnnnnnnnnnnnnnnnnnnnnnnnnnnnnnnnnnnnnnnnnnnnnnnnnnnnnnnnnnnnnnnnnnnnnnnnnnnnnnnnnnnnnnnnnnnnnnnnnnnnnnnnnnnnnnnnnnnnnnnnnnnnnnnnnnnnnnnnnnnnnnnnnnnnnnnnnnnnnnnnnnnnnnnnnnnnnnnnnnnnnnnnnnnnnnnnnnnnnnnnnnnnnnnnnnnnnnnnnnnnnnnnnnnnnnnnnnnnnnnnnnnnnnnnnnnnnnnnnnnnnnnnnnnnnnnnnnnnnnnnnnnnnnnnnnnnnnnnnnnnnnnnnnnnnnnnnnnnnnnnnnnnnnnnnnnnnnnnnnnnnnnnnnnnnnnnnnnnnnnnnnnnnnnnnnnnnnnnnnnnnnnnnnnnnnnnnnnnnnnnnnnnnnnnnnnnnnnnnnnnnnnnnnnnnnnnnnnnnnnnnnnnnnnnnnnnnnnnnnnnnnnnnnnnnnnnnnnnnnnnnnnnnnnnnnnnnnnnnnnnnnnnnnnnnnnnnnnnnnnnnnnnnnnnnnnnnnnnnnnnnnnnnnnnnnnnnnnnnnnnnnnnnnnnnnnnnnnnnnnnnnnnnnnnnnnnnnnnnnnnnnnnnnnnnnnnnnnnnnnnnnnnnnnnnnnnnnnnnnnnnnnnnnnnnnnnnnnnnnnnnnnnnnnnnnnnnnnnnnnnnnnnnnnnnnnnnnnnnnnnnnnnnnnnnnnnnnnnnnnnnnnnnnnnnnnnnnnnnnnnnnnnnnnnnnnnnnnnnnnnnnnnnnnnnnnnnnnnnnnnnnnnnnnnnnnnnnnnnnnnnnnnnnnnnnnnnnnnnnnnnnnnnnnnnnnnnnnnnnnnnnnnnnnnnnnnnnnnnnnnnnnnnnnnnnnnnnnnnnnnnnnnnnnnnnnnnnnnnnnnnnnnnnnnnnnnnnnnnnnnnnnnnnnnnnnnnnnnnnnnnnnnnnnnnnnnnnnnnnnnnnnnnnnnnnnnnnnnnnnnnnnnnnnnnnnnnnnnnnnnnnnnnnnnnnnnnnnnnnnnnnnnnnnnnnnnnnnnnnnnnnnnnnnnnnnnnnnnnnnnnnnnnnnnnnnnnnnnnnnnnnnnnnnnnnnnnnnnnnnnnnnnnnnnnnnnnnnnnnnnnnnnnnnnnnnnnnnnnnnnnnnnnnnnnnnnnnnnnnnnnnnnnnnnnnnnnnnnnnnnnnnnnnnnnnnnnnnnnnnnnnnnnnnnnnnnnnnnnnnnnnnnnnnnnnnnnnnnnnnnnnnnnnnnnnnnnnnnnnnnnnnnnnnnnnnnnnnnnnnnnnnnnnnnnnnnnnnnnnnnnnnnnnnnnnnnnnnnnnnnnnnnnnnnnnnnnnnnnnnnnnnnnnnnnnnnnnnnnnnnnnnnnnnnnnnnnnnnnnnnnnnnnnnnnnnnnnnnnnnnnnnnnnnnnnnnnnnnnnnnnnnnnnnnnnnnnnnnnnnnnnnnnnnnnnnnnnnnnnnnnnnnnnnnnnnnnnnnnnnnnnnnnnnnnnnnnnnnnnnnnnnnnnnnnnnnnnnnnnnnnnnnnnnnnnnnnnnnnnnnnnnnnnnnnnnnnnnnnnnnnnnnnnnnnnnnnnnnnnnnnnnnnnnnnnnnnnnnnnnnnnnnnnnnnnnnnnnnnnnnnnnnnnnnnnnnnnnnnnnnnnnnnnnnnnnnnnnnnnnnnnnnnnnnnnnnnnnnnnnnnnnnnnnnnnnnnnnnnnnnnnnnnnnnnnnnnnnnnnnnnnnnnnnnnnnnnnnnnnnnnnnnnnnnnnnnnnnnnnnnnnnnnnnnnnnnnnnnnnnnnnnnnnnnnnnnnnnnnnnnnnnnnnnnnnnnnnnnnnnnnnnnnnnnnnnnnnnnnnnnnnnnnnnnnnnnnnnnnnnnnnnnnnnnnnnnnnnnnnnnnnnnnnnnnnnnnnnnnnnnnnnnnnnnnnnnnnnnnnnnnnnnnnnnnnnnnnnnnnnnnnnnnnnnnnnnnnnnnnnnnnnnnnnnnnnnnnnnnnnnnnnnnnnnnnnnnnnnnnnnnnnnnnnnnnnnnnnnnnnnnnnnnnnnnnnnnnnnnnnnnnnnnnnnnnnnnnnnnnnnnnnnnnnnnnnnnnnnnnnnnnnnnnnnnnnnnnnnnnnnnnnnnnnnnnnnnnnnnnnnnnnnnnnnnnnnnnnnnnnnnnnnnnnnnnnnnnnnnnnnnnnnnnnnnnnnnnnnnnnnnnnnnnnnnnnnnnnnnnnnnnnnnnnnnnnnnnnnnnnnnnnnnnnnnnnnnnnnnnnnnnnnnnnnnnnnnnnnnnnnnnnnnnnnnnnnnnnnnnnnnnnnnnnnnnnnnnnnnnnnnnnnnnnnnnnnnnnnnnnnnnnnnnnnnnnnnnnnnnnnnnnnnnnnnnnnnnnnnnnnnnnnnnnnnnnnnnnnnnnnnnnnnnnnnnnnnnnnnnnnnnnnnnnnnnnnnnnnnnnnnnnnnnnnnnnnnnnnnnnnnnnnnnnnnnnnnnnnnnnnnnnnnnnnnnnnnnnnnnnnnnnnnnnnnnnnnnnnnnnnnnnnnnnnnnnnnnnnnnnnnnnnnnnnnnnnnnnnnnnnnnnnnnnnnnnnnnnnnnnnnnnnnnnnnnnnnnnnnnnnnnnnnnnnnnnnnnnnnnnnnnnnnnnnnnnnnnnnnnnnnnnnnnnnnnnnnnnnnnnnnnnnnnnnnnnnnnnnnnnnnnnnnnnnnnnnnnnnnnnnnnnnnnnnnnnnnnnnnnnnnnnnnnnnnnnnnnnnnnnnnnnnnnnnnnnnnnnnnnnnnnnnnnnnnnnnnnnnnnnnnnnnnnnnnnnnnnnnnnnnnnnnnnnnnnnnnnnnnnnnnnnnnnnnnnnnnnnnnnnnnnnnnnnnnnnnnnnnnnnnnnnnnnnnnnnnnnnnnnnnnnnnnnnnnnnnnnnnnnnnnnnnnnnnnnnnnnnnnnnnnnnnnnnnnnnnnnnnnnnnnnnnnnnnnnnnnnnnnnnnnnnnnnnnnnnnnnnnnnnnnnnnnnnnnnnnnnnnnnnnnnnnnnnnnnnnnnnnnnnnnnnnnnnnnnnnnnnnnnnnnnnnnnnnnnnnnnnnnnnnnnnnnnnnnnnnnnnnnnnnnnnnnnnnnnnnnnnnnnnnnnnnnnnnnnnnnnnnnnnnnnnnnnnnnnnnnnnnnnnnnnnnnnnnnnnnnnnnnnnnnnnnnnnnnnnnnnnnnnnnnnnnnnnnnnnnnnnnnnnnnnnnnnnnnnnnnnnnnnnnnnnnnnnnnnnnnnnnnnnnnnnnnnnnnnnnnnnnnnnnnnnnnnnnnnnnnnnnnnnnnnnnnnnnnnnnnnnnnnnnnnnnnnnnnnnnnnnnnnnnnnnnnnnnnnnnnnnnnnnnnnnnnnnnnnnnnnnnnnnnnnnnnnnnnnnnnnnnnnnnnnnnnnnnnnnnnnnnnnnnnnnnnnnnnnnnnnnnnnnnnnnnnnnnnnnnnnnnnnnnnnnnnnnnnnnnnnnnnnnnnnnnnnnnnnnnnnnnnnnnnnnnnnnnnnnnnnnnnnnnnnnnnnnnnnnnnnnnnnnnnnnnnnnnnnnnnnnnnnnnnnnnnnnnnnnnnnnnnnnnnnnnnnnnnnnnnnnnnnnnnnnnnnnnnnnnnnnnnnnnnnnnnnnnnnnnnnnnnnnnnnnnnnnnnnnnnnnnnnnnnnnnnnnnnnnnnnnnnnnnnnnnnnnnnnnnnnnnnnnnnnnnnnnnnnnnnnnnnnnnnnnnnnnnnnnnnnnnnnnnnnnnnnnnnnnnnnnnnnnnnnnnnnnnnnnnnnnnnnnnnnnnnnnnnnnnnnnnnnnnnnnnnnnnnnnnnnnnnnnnnnnnnnnnnnnnnnnnnnnnnnnnnnnnnnnnnnnnnnnnnnnnnnnnnnnnnnnnnnnnnnnnnnnnnnnnnnnnnnnnnnnnnnnnnnnnnnnnnnnnnnnnnnnnnnnnnnnnnnnnnnnnnnnnnnnnnnnnnnnnnnnnnnnnnnnnnnnnnnnnnnnnnnnnnnnnnnnnnnnnnnnnnnnnnnnnnnnnnnnnnnnnnnnnnnnnnnnnnnnnnnnnnnnnnnnnnnnnnnnnnnnnnnnnnnnnnnnnnnnnnnnnnnnnnnnnnnnnnnnnnnnnnnnnnnnnnnnnnnnnnnnnnnnnnnnnnnnnnnnnnnnnnnnnnnnnnnnnnnnnnnnnnnnnnnnnnnnnnnnnnnnnnnnnnnnnnnnnnnnnnnnnnnnnnnnnnnnnnnnnnnnnnnnnnnnnnnnnnnnnnnnnnnnnnnnnnnnnnnnnnnnnnnnnnnnnnnnnnnnnnnnnnnnnnnnnnnnnnnnnnnnnnnnnnnnnnnnnnnnnnnnnnnnnnnnnnnnnnnnnnnnnnnnnnnnnnnnnnnnnnnnnnnnnnnnnnnnnnnnnnnnnnnnnnnnnnnnnnnnnnnnnnnnnnnnnnnnnnnnnnnnnnnnnnnnnnnnnnnnnnnnnnnnnnnnnnnnnnnnnnnnnnnnnnnnnnnnnnnnnnnnnnnnnnnnnnnnnnnnnnnnnnnnnnnnnnnnnnnnnnnnnnnnnnnnnnnnnnnnnnnnnnnnnnnnnnnnnnnnnnnnnnnnnnnnnnnnnnnnnnnnnnnnnnnnnnnnnnnnnnnnnnnnnnnnnnnnnnnnnnnnnnnnnnnnnnnnnnnnnnnnnnnnnnnnnnnnnnnnnnnnnnnnnnnnnnnnnnnnnnnnnnnnnnnnnnnnnnnnnnnnnnnnnnnnnnnnnnnnnnnnnnnnnnnnnnnnnnnnnnnnnnnnnnnnnnnnnnnnnnnnnnnnnnnnnnnnnnnnnnnnnnnnnnnnnnnnnnnnnnnnnnnnnnnnnnnnnnnnnnnnnnnnnnnnnnnnnnnnnnnnnnnnnnnnnnnnnnnnnnnnnnnnnnnnnnnnnnnnnnnnnnnnnnnnnnnnnnnnnnnnnnnnnnnnnnnnnnnnnnnnnnnnnnnnnnnnnnnnnnnnnnnnnnnnnnnnnnnnnnnnnnnnnnnnnnnnnnnnnnnnnnnnnnnnnnnnnnnnnnnnnnnnnnnnnnnnnnnnnnnnnnnnnnnnnnnnnnnnnnnnnnnnnnnnnnnnnnnnnnnnnnnnnnnnnnnnnnnnnnnnnnnnnnnnnnnnnnnnnnnnnnnnnnnnnnnnnnnnnnnnnnnnnnnnnnnnnnnnnnnnnnnnnnnnnnnnnnnnnnnnnnnnnnnnnnnnnnnnnnnnnnnnnnnnnnnnnnnnnnnnnnnnnnnnnnnnnnnnnnnnnnnnnnnnnnnnnnnnnnnnnnnnnnnnnnnnnnnnnnnnnnnnnnnnnnnnnnnnnnnnnnnnnnnnnnnnnnnnnnnnnnnnnnnnnnnnnnnnnnnnnnnnnnnnnnnnnnnnnnnnnnnnnnnnnnnnnnnnnnnnnnnnnnnnnnnnnnnnnnnnnnnnnnnnnnnnnnnnnnnnnnnnnnnnnnnnnnnnnnnnnnnnnnnnnnnnnnnnnnnnnnnnnnnnnnnnnnnnnnnnnnnnnnnnnnnnnnnnnnnnnnnnnnnnnnnnnnnnnnnnnnnnnnnnnnnnnnnnnnnnnnnnnnnnnnnnnnnnnnnnnnnnnnnnnnnnnnnnnnnnnnnnnnnnnnnnnnnnnnnnnnnnnnnnnnnnnnnnnnnnnnnnnnnnnnnnnnnnnnnnnnnnnnnnnnnnnnnnnnnnnnnnnnnnnnnnnnnnnnnnnnnnnnnnnnnnnnnnnnnnnnnnnnnnnnnnnnnnnnnnnnnnnnnnnnnnnnnnnnnnnnnnnnnnnnnnnnnnnnnnnnnnnnnnnnnnnnnnnnnnnnnnnnnnnnnnnnnnnnnnnnnnnnnnnnnnnnnnnnnnnnnnnnnnnnnnnnnnnnnnnnnnnnnnnnnnnnnnnnnnnnnnnnnnnnnnnnnnnnnnnnnnnnnnnnnnnnnnnnnnnnnnnnnnnnnnnnnnnnnnnnnnnnnnnnnnnnnnnnnnnnnnnnnnnnnnnnnnnnnnnnnnnnnnnnnnnnnnnnnnnnnnnnnnnnnnnnnnnnnnnnnnnnnnnnnnnnnnnnnnnnnnnnnnnnnnnnnnnnnnnnnnnnnnnnnnnnnnnnnnnnnnnnnnnnnnnnnnnnnnnnnnnnnnnnnnnnnnnnnnnnnnnnnnnnnnnnnnnnnnnnnnnnnnnnnnnnnnnnnnnnnnnnnnnnnnnnnnnnnnnnnnnnnnnnnnnnnnnnnnnnnnnnnnnnnnnnnnnnnnnnnnnnnnnnnnnnnnnnnnnnnnnnnnnnnnnnnnnnnnnnnnnnnnnnnnnnnnnnnnnnnnnnnnnnnnnnnnnnnnnnnnnnnnnnnnnnnnnnnnnnnnnnnnnnnnnnnnnnnnnnnnnnnnnnnnnnnnnnnnnnnnnnnnnnnnnnnnnnnnnnnnnnnnnnnnnnnnnnnnnnnnnnnnnnnnnnnnnnnnnnnnnnnnnnnnnnnnnnnnnnnnnnnnnnnnnnnnnnnnnnnnnnnnnnnnnnnnnnnnnnnnnnnnnnnnnnnnnnnnnnnnnnnnnnnnnnnnnnnnnnnnnnnnnnnnnnnnnnnnnnnnnnnnnnnnnnnnnnnnnnnnnnnnnnnnnnnnnnnnnnnnnnnnnnnnnnnnnnnnnnnnnnnnnnnnnnnnnnnnnnnnnnnnnnnnnnnnnnnnnnnnnnnnnnnnnnnnnnnnnnnnnnnnnnnnnnnnnnnnnnnnnnnnnnnnnnnnnnnnnnnnnnnnnnnnnnnnnnnnnnnnnnnnnnnnnnnnnnnnnnnnnnnnnnnnnnnnnnnnnnnnnnnnnnnnnnnnnnnnnnnnnnnnnnnnnnnnnnnnnnnnnnnnnnnnnnnnnnnnnnnnnnnnnnnnnnnnnnnnnnnnnnnnnnnnnnnnnnnnnnnnnnnnnnnnnnnnnnnnnnnnnnnnnnnnnnnnnnnnnnnnnnnnnnnnnnnnnnnnnnnnnnnnnnnnnnnnnnnnnnnnnnnnnnnnnnnnnnnnnnnnnnnnnnnnnnnnnnnnnnnnnnnnnnnnnnnnnnnnnnnnnnnnnnnnnnnnnnnnnnnnnnnnnnnnnnnnnnnnnnnnnnnnnnnnnnnnnnnnnnnnnnnnnnnnnnnnnnnnnnnnnnnnnnnnnnnnnnnnnnnnnnnnnnnnnnnnnnnnnnnnnnnnnnnnnnnnnnnnnnnnnnnnnnnnnnnnnnnnnnnnnnnnnnnnnnnnnnnnnnnnnnnnnnnnnnnnnnnnnnnnnnnnnnnnnnnnnnnnnnnnnnnnnnnnnnnnnnnnnnnnnnnnnnnnnnnnnnnnnnnnnnnnnnnnnnnnnnnnnnnnnnnnnnnnnnnnnnnnnnnnnnnnnnnnnnnnnnnnnnnnnnnnnnnnnnnnnnnnnnnnnnnnnnnnnnnnnnnnnnnnnnnnnnnnnnnnnnnnnnnnnnnnnnnnnnnnnnnnnnnnnnnnnnnnnnnnnnnnnnnnnnnnnnnnnnnnnnnnnnnnnnnnnnnnnnnnnnnnnnnnnnnnnnnnnnnnnnnnnnnnnnnnnnnnnnnnnnnnnnnnnnnnnnnnnnnnnnnnnnnnnnnnnnnnnnnnnnnnnnnnnnnnnnnnnnnnnnnnnnnnnnnnnnnnnnnnnnnnnnnnnnnnnnnnnnnnnnnnnnnnnnnnnnnnnnnnnnnnnnnnnnnnnnnnnnnnnnnnnnnnnnnnnnnnnnnnnnnnnnnnnnnnnnnnnnnnnnnnnnnnnnnnnnnnnnnnnnnnnnnnnnnnnnnnnnnnnnnnnnnnnnnnnnnnnnnnnnnnnnnnnnnnnnnnnnnnnnnnnnnnnnnnnnnnnnnnnnnnnnnnnnnnnnnnnnnnnnnnnnnnnnnnnnnnnnnnnnnnnnnnnnnnnnnnnnnnnnnnnnnnnnnnnnnnnnnnnnnnnnnnnnnnnnnnnnnnnnnnnnnnnnnnnnnnnnnnnnnnnnnnnnnnnnnnnnnnnnnnnnnnnnnnnnnnnnnnnnnnnnnnnnnnnnnnnnnnnnnnnnnnnnnnnnnnnnnnnnnnnnnnnnnnnnnnnnnnnnnnnnnnnnnnnnnnnnnnnnnnnnnnnnnnnnnnnnnnnnnnnnnnnnnnnnnnnnnnnnnnnnnnnnnnnnnnnnnnnnnnnnnnnnnnnnnnnnnnnnnnnnnnnnnnnnnnnnnnnnnnnnnnnnnnnnnnnnnnnnnnnnnnnnnnnnnnnnnnnnnnnnnnnnnnnnnnnnnnnnnnnnnnnnnnnnnnnnnnnnnnnnnnnnnnnnnnnnnnnnnnnnnnnnnnnnnnnnnnnnnnnnnnnnnnnnnnnnnnnnnnnnnnnnnnnnnnnnnnnnnnnnnnnnnnnnnnnnnnnnnnnnnnnnnnnnnnnnnnnnnnnnnnnnnnnnnnnnnnnnnnnnnnnnnnnnnnnnnnnnnnnnnnnnnnnnnnnnnnnnnnnnnnnnnnnnnnnnnnnnnnnnnnnnnnnnnnnnnnnnnnnnnnnnnnnnnnnnnnnnnnnnnnnnnnnnnnnnnnnnnnnnnnnnnnnnnnnnnnnnnnnnnnnnnnnnnnnnnnnnnnnnnnnnnnnnnnnnnnnnnnnnnnnnnnnnnnnnnnnnnnnnnnnnnnnnnnnnnnnnnnnnnnnnnnnnnnnnnnnnnnnnnnnnnnnnnnnnnnnnnnnnnnnnnnnnnnnnnnnnnnnnnnnnnnnnnnnnnnnnnnnnnnnnnnnnnnnnnnnnnnnnnnnnnnnnnnnnnnnnnnnnnnnnnnnnnnnnnnnnnnnnnnnnnnnnnnnnnnnnnnnnnnnnnnnnnnnnnnnnnnnnnnnnnnnnnnnnnnnnnnnnnnnnnnnnnnnnnnnnnnnnnnnnnnnnnnnnnnnnnnnnnnnnnnnnnnnnnnnnnnnnnnnnnnnnnnnnnnnnnnnnnnnnnnnnnnnnnnnnnnnnnnnnnnnnnnnnnnnnnnnnnnnnnnnnnnnnnnnnnnnnnnnnnnnnnnnnnnnnnnnnnnnnnnnnnnnnnnnnnnnnnnnnnnnnnnnnnnnnnnnnnnnnnnnnnnnnnnnnnnnnnnnnnnnnnnnnnnnnnnnnnnnnnnnnnnnnnnnnnnnnnnnnnnnnnnnnnnnnnnnnnnnnnnnnnnnnnnnnnnnnnnnnnnnnnnnnnnnnnnnnnnnnnnnnnnnnnnnnnnnnnnnnnnnnnnnnnnnnnnnnnnnnnnnnnnnnnnnnnnnnnnnnnnnnnnnnnnnnnnnnnnnnnnnnnnnnnnnnnnnnnnnnnnnnnnnnnnnnnnnnnnnnnnnnnnnnnnnnnnnnnnnnnnnnnnnnnnnnnnnnnnnnnnnnnnnnnnnnnnnnnnnnnnnnnnnnnnnnnnnnnnnnnnnnnnnnnnnnnnnnnnnnnnnnnnnnnnnnnnnnnnnnnnnnnnnnnnnnnnnnnnnnnnnnnnnnnnnnnnnnnnnnnnnnnnnnnnnnnnnnnnnnnnnnnnnnnnnnnnnnnnnnnnnnnnnnnnnnnnnnnnnnnnnnnnnnnnnnnnnnnnnnnnnnnnnnnnnnnnnnnnnnnnnnnnnnnnnnnnnnnnnnnnnnnnnnnnnnnnnnnnnnnnnnnnnnnnnnnnnnnnnnnnnnnnnnnnnnnnnnnnnnnnnnnnnnnnnnnnnnnnnnnnnnnnnnnnnnnnnnnnnnnnnnnnnnnnnnnnnnnnnnnnnnnnnnnnnnnnnnnnnnnnnnnnnnnnnnnnnnnnnnnnnnnnnnnnnnnnnnnnnnnnnnnnnnnnnnnnnnnnnnnnnnnnnnnnnnnnnnnnnnnnnnnnnnnnnnnnnnnnnnnnnnnnnnnnnnnnnnnnnnnnnnnnnnnnnnnnnnnnnnnnnnnnnnnnnnnnnnnnnnnnnnnnnnnnnnnnnnnnnnnnnnnnnnnnnnnnnnnnnnnnnnnnnnnnnnnnnnnnnnnnnnnnnnnnnnnnnnnnnnnnnnnnnnnnnnnnnnnnnnnnnnnnnnnnnnnnnnnnnnnnnnnnnnnnnnnnnnnnnnnnnnnnnnnnnnnnnnnnnnnnnnnnnnnnnnnnnnnnnnnnnnnnnnnnnnnnnnnnnnnnnnnnnnnnnnnnnnnnnnnnnnnnnnnnnnnnnnnnnnnnnnnnnnnnnnnnnnnnnnnnnnnnnnnnnnnnnnnnnnnnnnnnnnnnnnnnnnnnnnnnnnnnnnnnnnnnnnnnnnnnnnnnnnnnnnnnnnnnnnnnnnnnnnnnnnnnnnnnnnnnnnnnnnnnnnnnnnnnnnnnnnnnnnnnnnnnnnnnnnnnnnnnnnnnnnnnnnnnnnnnnnnnnnnnnnnnnnnnnnnnnnnnnnnnnnnnnnnnnnnnnnnnnnnnnnnnnnnnnnnnnnnnnnnnnnnnnnnnnnnnnnnnnnnnnnnnnnnnnnnnnnnnnnnnnnnnnnnnnnnnnnnnnnnnnnnnnnnnnnnnnnnnnnnnnnnnnnnnnnnnnnnnnnnnnnnnnnnnnnnnnnnnnnnnnnnnnnnnnnnnnnnnnnnnnnnnnnnnnnnnnnnnnnnnnnnnnnnnnnnnnnnnnnnnnnnnnnnnnnnnnnnnnnnnnnnnnnnnnnnnnnnnnnnnnnnnnnnnnnnnnnnnnnnnnnnnnnnnnnnnnnnnnnnnnnnnnnnnnnnnnnnnnnnnnnnnnnnnnnnnnnnnnnnnnnnnnnnnnnnnnnnnnnnnnnnnnnnnnnnnnnnnnnnnnnnnnnnnnnnnnnnnnnnnnnnnnnnnnnnnnnnnnnnnnnnnnnnnnnnnnnnnnnnnnnnnnnnnnnnnnnnnnnnnnnnnnnnnnnnnnnnnnnnnnnnnnnnnnnnnnnnnnnnnnnnnnnnnnnnnnnnnnnnnnnnnnnnnnnnnnnnnnnnnnnnnnnnnnnnnnnnnnnnnnnnnnnnnnnnnnnnnnnnnnnnnnnnnnnnnnnnnnnnnnnnnnnnnnnnnnnnnnnnnnnnnnnnnnnnnnnnnnnnnnnnnnnnnnnnnnnnnnnnnnnnnnnnnnnnnnnnnnnnnnnnnnnnnnnnnnnnnnnnnnnnnnnnnnnnnnnnnnnnnnnnnnnnnnnnnnnnnnnnnnnnnnnnnnnnnnnnnnnnnnnnnnnnnnnnnnnnnnnnnnnnnnnnnnnnnnnnnnnnnnnnnnnnnnnnnnnnnnnnnnnnnnnnnnnnnnnnnnnnnnnnnnnnnnnnnnnnnnnnnnnnnnnnnnnnnnnnnnnnnnnnnnnnnnnnnnnnnnnnnnnnnnnnnnnnnnnnnnnnnnnnnnnnnnnnnnnnnnnnnnnnnnnnnnnnnnnnnnnnnnnnnnnnnnnnnnnnnnnnnnnnnnnnnnnnnnnnnnnnnnnnnnnnnnnnnnnnnnnnnnnnnnnnnnnnnnnnnnnnnnnnnnnnnnnnnnnnnnnnnnnnnnnnnnnnnnnnnnnnnnnnnnnnnnnnnnnnnnnnnnnnnnnnnnnnnnnnnnnnnnnnnnnnnnnnnnnnnnnnnnnnnnnnnnnnnnnnnnnnnnnnnnnnnnnnnnnnnnnnnnnnnnnnnnnnnnnnnnnnnnnnnnnnnnnnnnnnnnnnnnnnnnnnnnnnnnnnnnnnnnnnnnnnnnnnnnnnnnnnnnnnnnnnnnnnnnnnnnnnnnnnnnnnnnnnnnnnnnnnnnnnnnnnnnnnnnnnnnnnnnnnnnnnnnnnnnnnnnnnnnnnnnnnnnnnnnnnnnnnnnnnnnnnnnnnnnnnnnnnnnnnnnnnnnnnnnnnnnnnnnnnnnnnnnnnnnnnnnnnnnnnnnnnnnnnnnnnnnnnnnnnnnnnnnnnnnnnnnnnnnnnnnnnnnnnnnnnnnnnnnnnnnnnnnnnnnnnnnnnnnnnnnnnnnnnnnnnnnnnnnnnnnnnnnnnnnnnnnnnnnnnnnnnnnnnnnnnnnnnnnnnnnnnnnnnnnnnnnnnnnnnnnnnnnnnnnnnnnnnnnnnnnnnnnnnnnnnnnnnnnnnnnnnnnnnnnnnnnnnnnnnnnnnnnnnnnnnnnnnnnnnnnnnnnnnnnnnnnnnnnnnnnnnnnnnnnnnnnnnnnnnnnnnnnnnnnnnnnnnnnnnnnnnnnnnnnnnnnnnnnnnnnnnnnnnnnnnnnnnnnnnnnnnnnnnnnnnnnnnnnnnnnnnnnnnnnnnnnnnnnnnnnnnnnnnnnnnnnnnnnnnnnnnnnnnnnnnnnnnnnnnnnnnnnnnnnnnnnnnnnnnnnnnnnnnnnnnnnnnnnnnnnnnnnnnnnnnnnnnnnnnnnnnnnnnnnnnnnnnnnnnnnnnnnnnnnnnnnnnnnnnnnnnnnnnnnnnnnnnnnnnnnnnnnnnnnnnnnnnnnnnnnnnnnnnnnnnnnnnnnnnnnnnnnnnnnnnnnnnnnnnnnnnnnnnnnnnnnnnnnnnnnnnnnnnnnnnnnnnnnnnnnnnnnnnnnnnnnnnnnnnnnnnnnnnnnnnnnnnnnnnnnnnnnnnnnnnnnnnnnnnnnnnnnnnnnnnnnnnnnnnnnnnnnnnnnnnnnnnnnnnnnnnnnnnnnnnnnnnnnnnnnnnnnnnnnnnnnnnnnnnnnnnnnnnnnnnnnnnnnnnnnnnnnnnnnnnnnnnnnnnnnnnnnnnnnnnnnnnnnnnnnnnnnnnnnnnnnnnnnnnnnnnnnnnnnnnnnnnnnnnnnnnnnnnnnnnnnnnnnnnnnnnnnnnnnnnnnnnnnnnnnnnnnnnnnnnnnnnnnnnnnnnnnnnnnnnnnnnnnnnnnnnnnnnnnnnnnnnnnnnnnnnnnnnnnnnnnnnnnnnnnnnnnnnnnnnnnnnnnnnnnnnnnnnnnnnnnnnnnnnnnnnnnnnnnnnnnnnnnnnnnnnnnnnnnnnnnnnnnnnnnnnnnnnnnnnnnnnnnnnnnnnnnnnnnnnnnnnnnnnnnnnnnnnnnnnnnnnnnnnnnnnnnnnnnnnnnnnnnnnnnnnnnnnnnnnnnnnnnnnnnnnnnnnnnnnnnnnnnnnnnnnnnnnnnnnnnnnnnnnnnnnnnnnnnnnnnnnnnnnnnnnnnnnnnnnnnnnnnnnnnnnnnnnnnnnnnnnnnnnnnnnnnnnnnnnnnnnnnnnnnnnnnnnnnnnnnnnnnnnnnnnnnnnnnnnnnnnnnnnnnnnnnnnnnnnnnnnnnnnnnnnnnnnnnnnnnnnnnnnnnnnnnnnnnnnnnnnnnnnnnnnnnnnnnnnnnnnnnnnnnnnnnnnnnnnnnnnnnnnnnnnnnnnnnnnnnnnnnnnnnnnnnnnnnnnnnnnnnnnnnnnnnnnnnnnnnnnnnnnnnnnnnnnnnnnnnnnnnnnnnnnnnnnnnnnnnnnnnnnnnnnnnnnnnnnnnnnnnnnnnnnnnnnnnnnnnnnnnnnnnnnnnnnnnnnnnnnnnnnnnnnnnnnnnnnnnnnnnnnnnnnnnnnnnnnnnnnnnnnnnnnnnnnnnnnnnnnnnnnnnnnnnnnnnnnnnnnnnnnnnnnnnnnnnnnnnnnnnnnnnnnnnnnnnnnnnnnnnnnnnnnnnnnnnnnnnnnnnnnnnnnnnnnnnnnnnnnnnnnnnnnnnnnnnnnnnnnnnnnnnnnnnnnnnnnnnnnnnnnnnnnnnnnnnnnnnnnnnnnnnnnnnnnnnnnnnnnnnnnnnnnnnnnnnnnnnnnnnnnnnnnnnnnnnnnnnnnnnnnnnnnnnnnnnnnnnnnnnnnnnnnnnnnnnnnnnnnnnnnnnnnnnnnnnnnnnnnnnnnnnnnnnnnnnnnnnnnnnnnnnnnnnnnnnnnnnnnnnnnnnnnnnnnnnnnnnnnnnnnnnnnnnnnnnnnnnnnnnnnnnnnnnnnnnnnnnnnnnnnnnnnnnnnnnnnnnnnnnnnnnnnnnnnnnnnnnnnnnnnnnnnnnnnnnnnnnnnnnnnnnnnnnnnnnnnnnnnnnnnnnnnnnnnnnnnnnnnnnnnnnnnnnnnnnnnnnnnnnnnnnnnnnnnnnnnnnnnnnnnnnnnnnnnnnnnnnnnnnnnnnnnnnnnnnnnnnnnnnnnnnnnnnnnnnnnnnnnnnnnnnnnnnnnnnnnnnnnnnnnnnnnnnnnnnnnnnnnnnnnnnnnnnnnnnnnnnnnnnnnnnnnnnnnnnnnnnnnnnnnnnnnnnnnnnnnnnnnnnnnnnnnnnnnnnnnnnnnnnnnnnnnnnnnnnnnnnnnnnnnnnnnnnnnnnnnnnnnnnnnnnnnnnnnnnnnnnnnnnnnnnnnnnnnnnnnnnnnnnnnnnnnnnnnnnnnnnnnnnnnnnnnnnnnnnnnnnnnnnnnnnnnnnnnnnnnnnnnnnnnnnnnnnnnnnnnnnnnnnnnnnnnnnnnnnnnnnnnnnnnnnnnnnnnnnnnnnnnnnnnnnnnnnnnnnnnnnnnnnnnnnnnnnnnnnnnnnnnnnnnnnnnnnnnnnnnnnnnnnnnnnnnnnnnnnnnnnnnnnnnnnnnnnnnnnnnnnnnnnnnnnnnnnnnnnnnnnnnnnnnnnnnnnnnnnnnnnnnnnnnnnnnnnnnnnnnnnnnnnnnnnnnnnnnnnnnnnnnnnnnnnnnnnnnnnnnnnnnnnnnnnnnnnnnnnnnnnnnnnnnnnnnnnnnnnnnnnnnnnnnnnnnnnnnnnnnnnnnnnnnnnnnnnnnnnnnnnnnnnnnnnnnnnnnnnnnnnnnnnnnnnnnnnnnnnnnnnnnnnnnnnnnnnnnnnnnnnnnnnnnnnnnnnnnnnnnnnnnnnnnnnnnnnnnnnnnnnnnnnnnnnnnnnnnnnnnnnnnnnnnnnnnnnnnnnnnnnnnnnnnnnnnnnnnnnnnnnnnnnnnnnnnnnnnnnnnnnnnnnnnnnnnnnnnnnnnnnnnnnnnnnnnnnnnnnnnnnnnnnnnnnnnnnnnnnnnnnnnnnnnnnnnnnnnnnnnnnnnnnnnnnnnnnnnnnnnnnnnnnnnnnnnnnnnnnnnnnnnnnnnnnnnnnnnnnnnnnnnnnnnnnnnnnnnnnnnnnnnnnnnnnnnnnnnnnnnnnnnnnnnnnnnnnnnnnnnnnnnnnnnnnnnnnnnnnnnnnnnnnnnnnnnnnnnnnnnnnnnnnnnnnnnnnnnnnnnnnnnnnnnnnnnnnnnnnnnnnnnnnnnnnnnnnnnnnnnnnnnnnnnnnnnnnnnnnnnnnnnnnnnnnnnnnnnnnnnnnnnnnnnnnnnnnnnnnnnnnnnnnnnnnnnnnnnnnnnnnnnnnnnnnnnnnnnnnnnnnnnnnnnnnnnnnnnnnnnnnnnnnnnnnnnnnnnnnnnnnnnnnnnnnnnnnnnnnnnnnnnnnnnnnnnnnnnnnnnnnnnnnnnnnnnnnnnnnnnnnnnnnnnnnnnnnnnnnnnnnnnnnnnnnnnnnnnnnnnnnnnnnnnnnnnnnnnnnnnnnnnnnnnnnnnnnnnnnnnnnnnnnnnnnnnnnnnnnnnnnnnnnnnnnnnnnnnnnnnnnnnnnnnnnnnnnnnnnnnnnnnnnnnnnnnnnnnnnnnnnnnnnnnnnnnnnnnnnnnnnnnnnnnnnnnnnnnnnnnnnnnnnnnnnnnnnnnnnnnnnnnnnnnnnnnnnnnnnnnnnnnnnnnnnnnnnnnnnnnnnnnnnnnnnnnnnnnnnnnnnnnnnnnnnnnnnnnnnnnnnnnnnnnnnnnnnnnnnnnnnnnnnnnnnnnnnnnnnnnnnnnnnnnnnnnnnnnnnnnnnnnnnnnnnnnnnnnnnnnnnnnnnnnnnnnnnnnnnnnnnnnnnnnnnnnnnnnnnnnnnnnnnnnnnnnnnnnnnnnnnnnnnnnnnnnnnnnnnnnnnnnnnnnnnnnnnnnnnnnnnnnnnnnnnnnnnnnnnnnnnnnnnnnnnnnnnnnnnnnnnnnnnnnnnnnnnnnnnnnnnnnnnnnnnnnnnnnnnnnnnnnnnnnnnnnnnnnnnnnnnnnnnnnnnnnnnnnnnnnnnnnnnnnnnnnnnnnnnnnnnnnnnnnnnnnnnnnnnnnnnnnnnnnnnnnnnnnnnnnnnnnnnnnnnnnnnnnnnnnnnnnnnnnnnnnnnnnnnnnnnnnnnnnnnnnnnnnnnnnnnnnnnnnnnnnnnnnnnnnnnnnnnnnnnnnnnnnnnnnnnnnnnnnnnnnnnnnnnnnnnnnnnnnnnnnnnnnnnnnnnnnnnnnnnnnnnnnnnnnnnnnnnnnnnnnnnnnnnnnnnnnnnnnnnnnnnnnnnnnnnnnnnnnnnnnnnnnnnnnnnnnnnnnnnnnnnnnnnnnnnnnnnnnnnnnnnnnnnnnnnnnnnnnnnnnnnnnnnnnnnnnnnnnnnnnnnnnnnnnnnnnnnnnnnnnnnnnnnnnnnnnnnnnnnnnnnnnnnnnnnnnnnnnnnnnnnnnnnnnnnnnnnnnnnnnnnnnnnnnnnnnnnnnnnnnnnnnnnnnnnnnnnnnnnnnnnnnnnnnnnnnnnnnnnnnnnnnnnnnnnnnnnnnnnnnnnnnnnnnnnnnnnnnnnnnnnnnnnnnnnnnnnnnnnnnnnnnnnnnnnnnnnnnnnnnnnnnnnnnnnnnnnnnnnnnnnnnnnnnnnnnnnnnnnnnnnnnnnnnnnnnnnnnnnnnnnnnnnnnnnnnnnnnnnnnnnnnnnnnnnnnnnnnnnnnnnnnnnnnnnnnnnnnnnnnnnnnnnnnnnnnnnnnnnnnnnnnnnnnnnnnnnnnnnnnnnnnnnnnnnnnnnnnnnnnnnnnnnnnnnnnnnnnnnnnnnnnnnnnnnnnnnnnnnnnnnnnnnnnnnnnnnnnnnnnnnnnnnnnnnnnnnnnnnnnnnnnnnnnnnnnnnnnnnnnnnnnnnnnnnnnnnnnnnnnnnnnnnnnnnnnnnnnnnnnnnnnnnnnnnnnnnnnnnnnnnnnnnnnnnnnnnnnnnnnnnnnnnnnnnnnnnnnnnnnnnnnnnnnnnnnnnnnnnnnnnnnnnnnnnnnnnnnnnnnnnnnnnnnnnnnnnnnnnnnnnnnnnnnnnnnnnnnnnnnnnnnnnnnnnnnnnnnnnnnnnnnnnnnnnnnnnnnnnnnnnnnnnnnnnnnnnnnnnnnnnnnnnnnnnnnnnnnnnnnnnnnnnnnnnnnnnnnnnnnnnnnnnnnnnnnnnnnnnnnnnnnnnnnnnnnnnnnnnnnnnnnnnnnnnnnnnnnnnnnnnnnnnnnnnnnnnnnnnnnnnnnnnnnnnnnnnnnnnnnnnnnnnnnnnnnnnnnnnnnnnnnnnnnnnnnnnnnnnnnnnnnnnnnnnnnnnnnnnnnnnnnnnnnnnnnnnnnnnnnnnnnnnnnnnnnnnnnnnnnnnnnnnnnnnnnnnnnnnnnnnnnnnnnnnnnnnnnnnnnnnnnnnnnnnnnnnnnnnnnnnnnnnnnnnnnnnnnnnnnnnnnnnnnnnnnnnnnnnnnnnnnnnnnnnnnnnnnnnnnnnnnnnnnnnnnnnnnnnnnnnnnnnnnnnnnnnnnnnnnnnnnnnnnnnnnnnnnnnnnnnnnnnnnnnnnnnnnnnnnnnnnnnnnnnnnnnnnnnnnnnnnnnnnnnnnnnnnnnnnnnnnnnnnnnnnnnnnnnnnnnnnnnnnnnnnnnnnnnnnnnnnnnnnnnnnnnnnnnnnnnnnnnnnnnnnnnnnnnnnnnnnnnnnnnnnnnnnnnnnnnnnnnnnnnnnnnnnnnnnnnnnnnnnnnnnnnnnnnnnnnnnnnnnnnnnnnnnnnnnnnnnnnnnnnnnnnnnnnnnnnnnnnnnnnnnnnnnnnnnnnnnnnnnnnnnnnnnnnnnnnnnnnnnnnnnnnnnnnnnnnnnnnnnnnnnnnnnnnnnnnnnnnnnnnnnnnnnnnnnnnnnnnnnnnnnnnnnnnnnnnnnnnnnnnnnnnnnnnnnnnnnnnnnnnnnnnnnnnnnnnnnnnnnnnnnnnnnnnnnnnnnnnnnnnnnnnnnnnnnnnnnnnnnnnnnnnnnnnnnnnnnnnnnnnnnnnnnnnnnnnnnnnnnnnnnnnnnnnnnnnnnnnnnnnnnnnnnnnnnnnnnnnnnnnnnnnnnnnnnnnnnnnnnnnnnnnnnnnnnnnnnnnnnnnnnnnnnnnnnnnnnnnnnnnnnnnnnnnnnnnnnnnnnnnnnnnnnnnnnnnnnnnnnnnnnnnnnnnnnnnnnnnnnnnnnnnnnnnnnnnnnnnnnnnnnnnnnnnnnnnnnnnnnnnnnnnnnnnnnnnnnnnnnnnnnnnnnnnnnnnnnnnnnnnnnnnnnnnnnnnnnnnnnnnnnnnnnnnnnnnnnnnnnnnnnnnnnnnnnnnnnnnnnnnnnnnnnnnnnnnnnnnnnnnnnnnnnnnnnnnnnnnnnnnnnnnnnnnnnnnnnnnnnnnnnnnnnnnnnnnnnnnnnnnnnnnnnnnnnnnnnnnnnnnnnnnnnnnnnnnnnnnnnnnnnnnnnnnnnnnnnnnnnnnnnnnnnnnnnnnnnnnnnnnnnnnnnnnnnnnnnnnnnnnnnnnnnnnnnnnnnnnnnnnnnnnnnnnnnnnnnnnnnnnnnnnnnnnnnnnnnnnnnnnnnnnnnnnnnnnnnnnnnnnnnnnnnnnnnnnnnnnnnnnnnnnnnnnnnnnnnnnnnnnnnnnnnnnnnnnnnnnnnnnnnnnnnnnnnnnnnnnnnnnnnnnnnnnnnnnnnnnnnnnnnnnnnnnnnnnnnnnnnnnnnnnnnnnnnnnnnnnnnnnnnnnnnnnnnnnnnnnnnnnnnnnnnnnnnnnnnnnnnnnnnnnnnnnnnnnnnnnnnnnnnnnnnnnnnnnnnnnnnnnnnnnnnnnnnnnnnnnnnnnnnnnnnnnnnnnnnnnnnnnnnnnnnnnnnnnnnnnnnnnnnnnnnnnnnnnnnnnnnnnnnnnnnnnnnnnnnnnnnnnnnnnnnnnnnnnnnnnnnnnnnnnnnnnnnnnnnnnnnnnnnnnnnnnnnnnnnnnnnnnnnnnnnnnnnnnnnnnnnnnnnnnnnnnnnnnnnnnnnnnnnnnnnnnnnnnnnnnnnnnnnnnnnnnnnnnnnnnnnnnnnnnnnnnnnnnnnnnnnnnnnnnnnnnnnnnnnnnnnnnnnnnnnnnnnnnnnnnnnnnnnnnnnnnnnnnnnnnnnnnnnnnnnnnnnnnnnnnnnnnnnnnnnnnnnnnnnnnnnnnnnnnnnnnnnnnnnnnnnnnnnnnnnnnnnnnnnnnnnnnnnnnnnnnnnnnnnnnnnnnnnnnnnnnnnnnnnnnnnnnnnnnnnnnnnnnnnnnnnnnnnnnnnnnnnnnnnnnnnnnnnnnnnnnnnnnnnnnnnnnnnnnnnnnnnnnnnnnnnnnnnnnnnnnnnnnnnnnnnnnnnnnnnnnnnnnnnnnnnnnnnnnnnnnnnnnnnnnnnnnnnnnnnnnnnnnnnnnnnnnnnnnnnnnnnnnnnnnnnnnnnnnnnnnnnnnnnnnnnnnnnnnnnnnnnnnnnnnnnnnnnnnnnnnnnnnnnnnnnnnnnnnnnnnnnnnnnnnnnnnnnnnnnnnnnnnnnnnnnnnnnnnnnnnnnnnnnnnnnnnnnnnnnnnnnnnnnnnnnnnnnnnnnnnnnnnnnnnnnnnnnnnnnnnnnnnnnnnnnnnnnnnnnnnnnnnnnnnnnnnnnnnnnnnnnnnnnnnnnnnnnnnnnnnnnnnnnnnnnnnnnnnnnnnnnnnnnnnnnnnnnnnnnnnnnnnnnnnnnnnnnnnnnnnnnnnnnnnnnnnnnnnnnnnnnnnnnnnnnnnnnnnnnnnnnnnnnnnnnnnnnnnnnnnnnnnnnnnnnnnnnnnnnnnnnnnnnnnnnnnnnnnnnnnnnnnnnnnnnnnnnnnnnnnnnnnnnnnnnnnnnnnnnnnnnnnnnnnnnnnnnnnnnnnnnnnnnnnnnnnnnnnnnnnnnnnnnnnnnnnnnnnnnnnnnnnnnnnnnnnnnnnnnnnnnnnnnnnnnnnnnnnnnnnnnnnnnnnnnnnnnnnnnnnnnnnnnnnnnnnnnnnnnnnnnnnnnnnnnnnnnnnnnnnnnnnnnnnnnnnnnnnnnnnnnnnnnnnnnnnnnnnnnnnnnnnnnnnnnnnnnnnnnnnnnnnnnnnnnnnnnnnnnnnnnnnnnnnnnnnnnnnnnnnnnnnnnnnnnnnnnnnnnnnnnnnnnnnnnnnnnnnnnnnnnnnnnnnnnnnnnnnnnnnnnnnnnnnnnnnnnnnnnnnnnnnnnnnnnnnnnnnnnnnnnnnnnnnnnnnnnnnnnnnnnnnnnnnnnnnnnnnnnnnnnnnnnnnnnnnnnnnnnnnnnnnnnnnnnnnnnnnnnnnnnnnnnnnnnnnnnnnnnnnnnnnnnnnnnnnnnnnnnnnnnnnnnnnnnnnnnnnnnnnnnnnnnnnnnnnnnnnnnnnnnnnnnnnnnnnnnnnnnnnnnnnnnnnnnnnnnnnnnnnnnnnnnnnnnnnnnnnnnnnnnnnnnnnnnnnnnnnnnnnnnnnnnnnnnnnnnnnnnnnnnnnnnnnnnnnnnnnnnnnnnnnnnnnnnnnnnnnnnnnnnnnnnnnnnnnnnnnnnnnnnnnnnnnnnnnnnnnnnnnnnnnnnnnnnnnnnnnnnnnnnnnnnnnnnnnnnnnnnnnnnnnnnnnnnnnnnnnnnnnnnnnnnnnnnnnnnnnnnnnnnnnnnnnnnnnnnnnnnnnnnnnnnnnnnnnnnnnnnnnnnnnnnnnnnnnnnnnnnnnnnnnnnnnnnnnnnnnnnnnnnnnnnnnnnnnnnnnnnnnnnnnnnnnnnnnnnnnnnnnnnnnnnnnnnnnnnnnnnnnnnnnnnnnnnnnnnnnnnnnnnnnnnnnnnnnnnnnnnnnnnnnnnnnnnnnnnnnnnnnnnnnnnnnnnnnnnnnnnnnnnnnnnnnnnnnnnnnnnnnnnnnnnnnnnnnnnnnnnnnnnnnnnnnnnnnnnnnnnnnnnnnnnnnnnnnnnnnnnnnnnnnnnnnnnnnnnnnnnnnnnnnnnnnnnnnnnnnnnnnnnnnnnnnnnnnnnnnnnnnnnnnnnnnnnnnnnnnnnnnnnnnnnnnnnnnnnnnnnnnnnnnnnnnnnnnnnnnnnnnnnnnnnnnnnnnnnnnnnnnnnnnnnnnnnnnnnnnnnnnnnnnnnnnnnnnnnnnnnnnnnnnnnnnnnnnnnnnnnnnnnnnnnnnnnnnnnnnnnnnnnnnnnnnnnnnnnnnnnnnnnnnnnnnnnnnnnnnnnnnnnnnnnnnnnnnnnnnnnnnnnnnnnnnnnnnnnnnnnnnnnnnnnnnnnnnnnnnnnnnnnnnnnnnnnnnnnnnnnnnnnnnnnnnnnnnnnnnnnnnnnnnnnnnnnnnnnnnnnnnnnnnnnnnnnnnnnnnnnnnnnnnnnnnnnnnnnnnnnnnnnnnnnnnnnnnnnnnnnnnnnnnnnnnnnnnnnnnnnnnnnnnnnnnnnnnnnnnnnnnnnnnnnnnnnnnnnnnnnnnnnnnnnnnnnnnnnnnnnnnnnnnnnnnnnnnnnnnnnnnnnnnnnnnnnnnnnnnnnnnnnnnnnnnnnnnnnnnnnnnnnnnnnnnnnnnnnnnnnnnnnnnnnnnnnnnnnnnnnnnnnnnnnnnnnnnnnnnnnnnnnnnnnnnnnnnnnnnnnnnnnnnnnnnnnnnnnnnnnnnnnnnnnnnnnnnnnnnnnnnnnnnnnnnnnnnnnnnnnnnnnnnnnnnnnnnnnnnnnnnnnnnnnnnnnnnnnnnnnnnnnnnnnnnnnnnnnnnnnnnnnnnnnnnnnnnnnnnnnnnnnnnnnnnnnnnnnnnnnnnnnnnnnnnnnnnnnnnnnnnnnnnnnnnnnnnnnnnnnnnnnnnnnnnnnnnnnnnnnnnnnnnnnnnnnnnnnnnnnnnnnnnnnnnnnnnnnnnnnnnnnnnnnnnnnnnnnnnnnnnnnnnnnnnnnnnnnnnnnnnnnnnnnnnnnnnnnnnnnnnnnnnnnnnnnnnnnnnnnnnnnnnnnnnnnnnnnnnnnnnnnnnnnnnnnnnnnnnnnnnnnnnnnnnnnnnnnnnnnnnnnnnnnnnnnnnnnnnnnnnnnnnnnnnnnnnnnnnnnnnnnnnnnnnnnnnnnnnnnnnnnnnnnnnnnnnnnnnnnnnnnnnnnnnnnnnnnnnnnnnnnnnnnnnnnnnnnnnnnnnnnnnnnnnnnnnnnnnnnnnnnnnnnnnnnnnnnnnnnnnnnnnnnnnnnnnnnnnnnnnnnnnnnnnnnnnnnnnnnnnnnnnnnnnnnnnnnnnnnnnnnnnnnnnnnnnnnnnnnnnnnnnnnnnnnnnnnnnnnnnnnnnnnnnnnnnnnnnnnnnnnnnnnnnnnnnnnnnnnnnnnnnnnnnnnnnnnnnnnnnnnnnnnnnnnnnnnnnnnnnnnnnnnnnnnnnnnnnnnnnnnnnnnnnnnnnnnnnnnnnnnnnnnnnnnnnnnnnnnnnnnnnnnnnnnnnnnnnnnnnnnnnnnnnnnnnnnnnnnnnnnnnnnnnnnnnnnnnnnnnnnnnnnnnnnnnnnnnnnnnnnnnnnnnnnnnnnnnnnnnnnnnnnnnnnnnnnnnnnnnnnnnnnnnnnnnnnnnnnnnnnnnnnnnnnnnnnnnnnnnnnnnnnnnnnnnnnnnnnnnnnnnnnnnnnnnnnnnnnnnnnnnnnnnnnnnnnnnnnnnnnnnnnnnnnnnnnnnnnnnnnnnnnnnnnnnnnnnnnnnnnnnnnnnnnnnnnnnnnnnnnnnnnnnnnnnnnnnnnnnnnnnnnnnnnnnnnnnnnnnnnnnnnnnnnnnnnnnnnnnnnnnnnnnnnnnnnnnnnnnnnnnnnnnnnnnnnnnnnnnnnnnnnnnnnnnnnnnnnnnnnnnnnnnnnnnnnnnnnnnnnnnnnnnnnnnnnnnnnnnnnnnnnnnnnnnnnnnnnnnnnnnnnnnnnnnnnnnnnnnnnnnnnnnnnnnnnnnnnnnnnnnnnnnnnnnnnnnnnnnnnnnnnnnnnnnnnnnnnnnnnnnnnnnnnnnnnnnnnnnnnnnnnnnnnnnnnnnnnnnnnnnnnnnnnnnnnnnnnnnnnnnnnnnnnnnnnnnnnnnnnnnnnnnnnnnnnnnnnnnnnnnnnnnnnnnnnnnnnnnnnnnnnnnnnnnnnnnnnnnnnnnnnnnnnnnnnnnnnnnnnnnnnnnnnnnnnnnnnnnnnnnnnnnnnnnnnnnnnnnnnnnnnnnnnnnnnnnnnnnnnnnnnnnnnnnnnnnnnnnnnnnnnnnnnnnnnnnnnnnnnnnnnnnnnnnnnnnnnnnnnnnnnnnnnnnnnnnnnnnnnnnnnnnnnnnnnnnnnnnnnnnnnnnnnnnnnnnnnnnnnnnnnnnnnnnnnnnnnnnnnnnnnnnnnnnnnnnnnnnnnnnnnnnnnnnnnnnnnnnnnnnnnnnnnnnnnnnnnnnnnnnnnnnnnnnnnnnnnnnnnnnnnnnnnnnnnnnnnnnnnnnnnnnnnnnnnnnnnnnnnnnnnnnnnnnnnnnnnnnnnnnnnnnnnnnnnnnnnnnnnnnnnnnnnnnnnnnnnnnnnnnnnnnnnnnnnnnnnnnnnnnnnnnnnnnnnnnnnnnnnnnnnnnnnnnnnnnnnnnnnnnnnnnnnnnnnnnnnnnnnnnnnnnnnnnnnnnnnnnnnnnnnnnnnnnnnnnnnnnnnnnnnnnnnnnnnnnnnnnnnnnnnnnnnnnnnnnnnnnnnnnnnnnnnnnnnnnnnnnnnnnnnnnnnnnnnnnnnnnnnnnnnnnnnnnnnnnnnnnnnnnnnnnnnnnnnnnnnnnnnnnnnnnnnnnnnnnnnnnnnnnnnnnnnnnnnnnnnnnnnnnnnnnnnnnnnnnnnnnnnnnnnnnnnnnnnnnnnnnnnnnnnnnnnnnnnnnnnnnnnnnnnnnnnnnnnnnnnnnnnnnnnnnnnnnnnnnnnnnnnnnnnnnnnnnnnnnnnnnnnnnnnnnnnnnnnnnnnnnnnnnnnnnnnnnnnnnnnnnnnnnnnnnnnnnnnnnnnnnnnnnnnnnnnnnnnnnnnnnnnnnnnnnnnnnnnnnnnnnnnnnnnnnnnnnnnnnnnnnnnnnnnnnnnnnnnnnnnnnnnnnnnnnnnnnnnnnnnnnnnnnnnnnnnnnnnnnnnnnnnnnnnnnnnnnnnnnnnnnnnnnnnnnnnnnnnnnnnnnnnnnnnnnnnnnnnnnnnnnnnnnnnnnnnnnnnnnnnnnnnnnnnnnnnnnnnnnnnnnnnnnnnnnnnnnnnnnnnnnnnnnnnnnnnnnnnnnnnnnnnnnnnnnnnnnnnnnnnnnnnnnnnnnnnnnnnnnnnnnnnnnnnnnnnnnnnnnnnnnnnnnnnnnnnnnnnnnnnnnnnnnnnnnnnnnnnnnnnnnnnnnnnnnnnnnnnnnnnnnnnnnnnnnnnnnnnnnnnnnnnnnnnnnnnnnnnnnnnnnnnnnnnnnnnnnnnnnnnnnnnnnnnnnnnnnnnnnnnnnnnnnnnnnnnnnnnnnnnnnnnnnnnnnnnnnnnnnnnnnnnnnnnnnnnnnnnnnnnnnnnnnnnnnnnnnnnnnnnnnnnnnnnnnnnnnnnnnnnnnnnnnnnnnnnnnnnnnnnnnnnnnnnnnnnnnnnnnnnnnnnnnnnnnnnnnnnnnnnnnnnnnnnnnnnnnnnnnnnnnnnnnnnnnnnnnnnnnnnnnnnnnnnnnnnnnnnnnnnnnnnnnnnnnnnnnnnnnnnnnnnnnnnnnnnnnnnnnnnnnnnnnnnnnnnnnnnnnnnnnnnnnnnnnnnnnnnnnnnnnnnnnnnnnnnnnnnnnnnnnnnnnnnnnnnnnnnnnnnnnnnnnnnnnnnnnnnnnnnnnnnnnnnnnnnnnnnnnnnnnnnnnnnnnnnnnnnnnnnnnnnnnnnnnnnnnnnnnnnnnnnnnnnnnnnnnnnnnnnnnnnnnnnnnnnnnnnnnnnnnnnnnnnnnnnnnnnnnnnnnnnnnnnnnnnnnnnnnnnnnnnnnnnnnnnnnnnnnnnnnnnnnnnnnnnnnnnnnnnnnnnnnnnnnnnnnnnnnnnnnnnnnnnnnnnnnnnnnnnnnnnnnnnnnnnnnnnnnnnnnnnnnnnnnnnnnnnnnnnnnnnnnnnnnnnnnnnnnnnnnnnnnnnnnnnnnnnnnnnnnnnnnnnnnnnnnnnnnnnnnnnnnnnnnnnnnnnnnnnnnnnnnnnnnnnnnnnnnnnnnnnnnnnnnnnnnnnnnnnnnnnnnnnnnnnnnnnnnnnnnnnnnnnnnnnnnnnnnnnnnnnnnnnnnnnnnnnnnnnnnnnnnnnnnnnnnnnnnnnnnnnnnnnnnnnnnnnnnnnnnnnnnnnnnnnnnnnnnnnnnnnnnnnnnnnnnnnnnnnnnnnnnnnnnnnnnnnnnnnnnnnnnnnnnnnnnnnnnnnnnnnnnnnnnnnnnnnnnnnnnnnnnnnnnnnnnnnnnnnnnnnnnnnnnnnnnnnnnnnnnnnnnnnnnnnnnnnnnnnnnnnnnnnnnnnnnnnnnnnnnnnnnnnnnnnnnnnnnnnnnnnnnnnnnnnnnnnnnnnnnnnnnnnnnnnnnnnnnnnnnnnnnnnnnnnnnnnnnnnnnnnnnnnnnnnnnnnnnnnnnnnnnnnnnnnnnnnnnnnnnnnnnnnnnnnnnnnnnnnnnnnnnnnnnnnnnnnnnnnnnnnnnnnnnnnnnnnnnnnnnnnnnnnnnnnnnnnnnnnnnnnnnnnnnnnnnnnnnnnnnnnnnnnnnnnnnnnnnnnnnnnnnnnnnnnnnnnnnnnnnnnnnnnnnnnnnnnnnnnnnnnnnnnnnnnnnnnnnnnnnnnnnnnnnnnnnnnnnnnnnnnnnnnnnnnnnnnnnnnnnnnnnnnnnnnnnnnnnnnnnnnnnnnnnnnnnnnnnnnnnnnnnnnnnnnnnnnnnnnnnnnnnnnnnnnnnnnnnnnnnnnnnnnnnnnnnnnnnnnnnnnnnnnnnnnnnnnnnnnnnnnnnnnnnnnnnnnnnnnnnnnnnnnnnnnnnnnnnnnnnnnnnnnnnnnnnnnnnnnnnnnnnnnnnnnnnnnnnnnnnnnnnnnnnnnnnnnnnnnnnnnnnnnnnnnnnnnnnnnnnnnnnnnnnnnnnnnnnnnnnnnnnnnnnnnnnnnnnnnnnnnnnnnnnnnnnnnnnnnnnnnnnnnnnnnnnnnnnnnnnnnnnnnnnnnnnnnnnnnnnnnnnnnnnnnnnnnnnnnnnnnnnnnnnnnnnnnnnnnnnnnnnnnnnnnnnnnnnnnnnnnnnnnnnnnnnnnnnnnnnnnnnnnnnnnnnnnnnnnnnnnnnnnnnnnnnnnnnnnnnnnnnnnnnnnnnnnnnnnnnnnnnnnnnnnnnnnnnnnnnnnnnnnnnnnnnnnnnnnnnnnnnnnnnnnnnnnnnnnnnnnnnnnnnnnnnnnnnnnnnnnnnnnnnnnnnnnnnnnnnnnnnnnnnnnnnnnnnnnnnnnnnnnnnnnnnnnnnnnnnnnnnnnnnnnnnnnnnnnnnnnnnnnnnnnnnnnnnnnnnnnnnnnnnnnnnnnnnnnnnnnnnnnnnnnnnnnnnnnnnnnnnnnnnnnnnnnnnnnnnnnnnnnnnnnnnnnnnnnnnnnnnnnnnnnnnnnnnnnnnnnnnnnnnnnnnnnnnnnnnnnnnnnnnnnnnnnnnnnnnnnnnnnnnnnnnnnnnnnnnnnnnnnnnnnnnnnnnnnnnnnnnnnnnnnnnnnnnnnnnnnnnnnnnnnnnnnnnnnnnnnnnnnnnnnnnnnnnnnnnnnnnnnnnnnnnnnnnnnnnnnnnnnnnnnnnnnnnnnnnnnnnnnnnnnnnnnnnnnnnnnnnnnnnnnnnnnnnnnnnnnnnnnnnnnnnnnnnnnnnnnnnnnnnnnnnnnnnnnnnnnnnnnnnnnnnnnnnnnnnnnnnnnnnnnnnnnnnnnnnnnnnnnnnnnnnnnnnnnnnnnnnnnnnnnnnnnnnnnnnnnnnnnnnnnnnnnnnnnnnnnnnnnnnnnnnnnnnnnnnnnnnnnnnnnnnnnnnnnnnnnnnnnnnnnnnnnnnnnnnnnnnnnnnnnnnnnnnnnnnnnnnnnnnnnnnnnnnnnnnnnnnnnnnnnnnnnnnnnnnnnnnnnnnnnnnnnnnnnnnnnnnnnnnnnnnnnnnnnnnnnnnnnnnnnnnnnnnnnnnnnnnnnnnnnnnnnnnnnnnnnnnnnnnnnnnnnnnnnnnnnnnnnnnnnnnnnnnnnnnnnnnnnnnnnnnnnnnnnnnnnnnnnnnnnnnnnnnnnnnnnnnnnnnnnnnnnnnnnnnnnnnnnnnnnnnnnnnnnnnnnnnnnnnnnnnnnnnnnnnnnnnnnnnnnnnnnnnnnnnnnnnnnnnnnnnnnnnnnnnnnnnnnnnnnnnnnnnnnnnnnnnnnnnnnnnnnnnnnnnnnnnnnnnnnnnnnnnnnnnnnnnnnnnnnnnnnnnnnnnnnnnnnnnnnnnnnnnnnnnnnnnnnnnnnnnnnnnnnnnnnnnnnnnnnnnnnnnnnnnnnnnnnnnnnnnnnnnnnnnnnnnnnnnnnnnnnnnnnnnnnnnnnnnnnnnnnnnnnnnnnnnnnnnnnnnnnnnnnnnnnnnnnnnnnnnnnnnnnnnnnnnnnnnnnnnnnnnnnnnnnnnnnnnnnnnnnnnnnnnnnnnnnnnnnnnnnnnnnnnnnnnnnnnnnnnnnnnnnnnnnnnnnnnnnnnnnnnnnnnnnnnnnnnnnnnnnnnnnnnnnnnnnnnnnnnnnnnnnnnnnnnnnnnnnnnnnnnnnnnnnnnnnnnnnnnnnnnnnnnnnnnnnnnnnnnnnnnnnnnnnnnnnnnnnnnnnnnnnnnnnnnnnnnnnnnnnnnnnnnnnnnnnnnnnnnnnnnnnnnnnnnnnnnnnnnnnnnnnnnnnnnnnnnnnnnnnnnnnnnnnnnnnnnnnnnnnnnnnnnnnnnnnnnnnnnnnnnnnnnnnnnnnnnnnnnnnnnnnnnnnnnnnnnnnnnnnnnnnnnnnnnnnnnnnnnnnnnnnnnnnnnnnnnnnnnnnnnnnnnnnnnnnnnnnnnnnnnnnnnnnnnnnnnnnnnnnnnnnnnnnnnnnnnnnnnnnnnnnnnnnnnnnnnnnnnnnnnnnnnnnnnnnnnnnnnnnnnnnnnnnnnnnnnnnnnnnnnnnnnnnnnnnnnnnnnnnnnnnnnnnnnnnnnnnnnnnnnnnnnnnnnnnnnnnnnnnnnnnnnnnnnnnnnnnnnnnnnnnnnnnnnnnnnnnnnnnnnnnnnnnnnnnnnnnnnnnnnnnnnnnnnnnnnnnnnnnnnnnnnnnnnnnnnnnnnnnnnnnnnnnnnnnnnnnnnnnnnnnnnnnnnnnnnnnnnnnnnnnnnnnnnnnnnnnnnnnnnnnnnnnnnnnnnnnnnnnnnnnnnnnnnnnnnnnnnnnnnnnnnnnnnnnnnnnnnnnnnnnnnnnnnnnnnnnnnnnnnnnnnnnnnnnnnnnnnnnnnnnnnnnnnnnnnnnnnnnnnnnnnnnnnnnnnnnnnnnnnnnnnnnnnnnnnnnnnnnnnnnnnnnnnnnnnnnnnnnnnnnnnnnnnnnnnnnnnnnnnnnnnnnnnnnnnnnnnnnnnnnnnnnnnnnnnnnnnnnnnnnnnnnnnnnnnnnnnnnnnnnnnnnnnnnnnnnnnnnnnnnnnnnnnnnnnnnnnnnnnnnnnnnnnnnnnnnnnnnnnnnnnnnnnnnnnnnnnnnnnnnnnnnnnnnnnnnnnnnnnnnnnnnnnnnnnnnnnnnnnnnnnnnnnnnnnnnnnnnnnnnnnnnnnnnnnnnnnnnnnnnnnnnnnnnnnnnnnnnnnnnnnnnnnnnnnnnnnnnnnnnnnnnnnnnnnnnnnnnnnnnnnnnnnnnnnnnnnnnnnnnnnnnnnnnnnnnnnnnnnnnnnnnnnnnnnnnnnnnnnnnnnnnnnnnnnnnnnnnnnnnnnnnnnnnnnnnnnnnnnnnnnnnnnnnnnnnnnnnnnnnnnnnnnnnnnnnnnnnnnnnnnnnnnnnnnnnnnnnnnnnnnnnnnnnnnnnnnnnnnnnnnnnnnnnnnnnnnnnnnnnnnnnnnnnnnnnnnnnnnnnnnnnnnnnnnnnnnnnnnnnnnnnnnnnnnnnnnnnnnnnnnnnnnnnnnnnnnnnnnnnnnnnnnnnnnnnnnnnnnnnnnnnnnnnnnnnnnnnnnnnnnnnnnnnnnnnnnnnnnnnnnnnnnnnnnnnnnnnnnnnnnnnnnnnnnnnnnnnnnnnnnnnnnnnnnnnnnnnnnnnnnnnnnnnnnnnnnnnnnnnnnnnnnnnnnnnnnnnnnnnnnnnnnnnnnnnnnnnnnnnnnnnnnnnnnnnnnnnnnnnnnnnnnnnnnnnnnnnnnnnnnnnnnnnnnnnnnnnnnnnnnnnnnnnnnnnnnnnnnnnnnnnnnnnnnnnnnnnnnnnnnnnnnnnnnnnnnnnnnnnnnnnnnnnnnnnnnnnnnnnnnnnnnnnnnnnnnnnnnnnnnnnnnnnnnnnnnnnnnnnnnnnnnnnnnnnnnnnnnnnnnnnnnnnnnnnnnnnnnnnnnnnnnnnnnnnnnnnnnnnnnnnnnnnnnnnnnnnnnnnnnnnnnnnnnnnnnnnnnnnnnnnnnnnnnnnnnnnnnnnnnnnnnnnnnnnnnnnnnnnnnnnnnnnnnnnnnnnnnnnnnnnnnnnnnnnnnnnnnnnnnnnnnnnnnnnnnnnnnnnnnnnnnnnnnnnnnnnnnnnnnnnnnnnnnnnnnnnnnnnnnnnnnnnnnnnnnnnnnnnnnnnnnnnnnnnnnnnnnnnnnnnnnnnnnnnnnnnnnnnnnnnnnnnnnnnnnnnnnnnnnnnnnnnnnnnnnnnnnnnnnnnnnnnnnnnnnnnnnnnnnnnnnnnnnnnnnnnnnnnnnnnnnnnnnnnnnnnnnnnnnnnnnnnnnnnnnnnnnnnnnnnnnnnnnnnnnnnnnnnnnnnnnnnnnnnnnnnnnnnnnnnnnnnnnnnnnnnnnnnnnnnnnnnnnnnnnnnnnnnnnnnnnnnnnnnnnnnnnnnnnnnnnnnnnnnnnnnnnnnnnnnnnnnnnnnnnnnnnnnnnnnnnnnnnnnnnnnnnnnnnnnnnnnnnnnnnnnnnnnnnnnnnnnnnnnnnnnnnnnnnnnnnnnnnnnnnnnnnnnnnnnnnnnnnnnnnnnnnnnnnnnnnnnnnnnnnnnnnnnnnnnnnnnnnnnnnnnnnnnnnnnnnnnnnnnnnnnnnnnnnnnnnnnnnnnnnnnnnnnnnnnnnnnnnnnnnnnnnnnnnnnnnnnnnnnnnnnnnnnnnnnnnnnnnnnnnnnnnnnnnnnnnnnnnnnnnnnnnnnnnnnnnnnnnnnnnnnnnnnnnnnnnnnnnnnnnnnnnnnnnnnnnnnnnnnnnnnnnnnnnnnnnnnnnnnnnnnnnnnnnnnnnnnnnnnnnnnnnnnnnnnnnnnnnnnnnnnnnnnnnnnnnnnnnnnnnnnnnnnnnnnnnnnnnnnnnnnnnnnnnnnnnnnnnnnnnnnnnnnnnnnnnnnnnnnnnnnnnnnnnnnnnnnnnnnnnnnnnnnnnnnnnnnnnnnnnnnnnnnnnnnnnnnnnnnnnnnnnnnnnnnnnnnnnnnnnnnnnnnnnnnnnnnnnnnnnnnnnnnnnnnnnnnnnnnnnnnnnnnnnnnnnnnnnnnnnnnnnnnnnnnnnnnnnnnnnnnnnnnnnnnnnnnnnnnnnnnnnnnnnnnnnnnnnnnnnnnnnnnnnnnnnnnnnnnnnnnnnnnnnnnnnnnnnnnnnnnnnnnnnnnnnnnnnnnnnnnnnnnnnnnnnnnnnnnnnnnnnnnnnnnnnnnnnnnnnnnnnnnnnnnnnnnnnnnnnnnnnnnnnnnnnnnnnnnnnnnnnnnnnnnnnnnnnnnnnnnnnnnnnnnnnnnnnnnnnnnnnnnnnnnnnnnnnnnnnnnnnnnnnnnnnnnnnnnnnnnnnnnnnnnnnnnnnnnnnnnnnnnnnnnnnnnnnnnnnnnnnnnnnnnnnnnnnnnnnnnnnnnnnnnnnnnnnnnnnnnnnnnnnnnnnnnnnnnnnnnnnnnnnnnnnnnnnnnnnnnnnnnnnnnnnnnnnnnnnnnnnnnnnnnnnnnnnnnnnnnnnnnnnnnnnnnnnnnnnnnnnnnnnnnnnnnnnnnnnnnnnnnnnnnnnnnnnnnnnnnnnnnnnnnnnnnnnnnnnnnnnnnnnnnnnnnnnnnnnnnnnnnnnnnnnnnnnnnnnnnnnnnnnnnnnnnnnnnnnnnnnnnnnnnnnnnnnnnnnnnnnnnnnnnnnnnnnnnnnnnnnnnnnnnnnnnnnnnnnnnnnnnnnnnnnnnnnnnnnnnnnnnnnnnnnnnnnnnnnnnnnnnnnnnnnnnnnnnnnnnnnnnnnnnnnnnnnnnnnnnnnnnnnnnnnnnnnnnnnnnnnnnnnnnnnnnnnnnnnnnnnnnnnnnnnnnnnnnnnnnnnnnnnnnnnnnnnnnnnnnnnnnnnnnnnnnnnnnnnnnnnnnnnnnnnnnnnnnnnnnnnnnnnnnnnnnnnnnnnnnnnnnnnnnnnnnnnnnnnnnnnnnnnnnnnnnnnnnnnnnnnnnnnnnnnnnnnnnnnnnnnnnnnnnnnnnnnnnnnnnnnnnnnnnnnnnnnnnnnnnnnnnnnnnnnnnnnnnnnnnnnnnnnnnnnnnnnnnnnnnnnnnnnnnnnnnnnnnnnnnnnnnnnnnnnnnnnnnnnnnnnnnnnnnnnnnnnnnnnnnnnnnnnnnnnnnnnnnnnnnnnnnnnnnnnnnnnnnnnnnnnnnnnnnnnnnnnnnnnnnnnnnnnnnnnnnnnnnnnnnnnnnnnnnnnnnnnnnnnnnnnnnnnnnnnnnnnnnnnnnnnnnnnnnnnnnnnnnnnnnnnnnnnnnnnnnnnnnnnnnnnnnnnnnnnnnnnnnnnnnnnnnnnnnnnnnnnnnnnnnnnnnnnnnnnnnnnnnnnnnnnnnnnnnnnnnnnnnnnnnnnnnnnnnnnnnnnnnnnnnnnnnnnnnnnnnnnnnnnnnnnnnnnnnnnnnnnnnnnnnnnnnnnnnnnnnnnnnnnnnnnnnnnnnnnnnnnnnnnnnnnnnnnnnnnnnnnnnnnnnnnnnnnnnnnnnnnnnnnnnnnnnnnnnnnnnnnnnnnnnnnnnnnnnnnnnnnnnnnnnnnnnnnnnnnnnnnnnnnnnnnnnnnnnnnnnnnnnnnnnnnnnnnnnnnnnnnnnnnnnnnnnnnnnnnnnnnnnnnnnnnnnnnnnnnnnnnnnnnnnnnnnnnnnnnnnnnnnnnnnnnnnnnnnnnnnnnnnnnnnnnnnnnnnnnnnnnnnnnnnnnnnnnnnnnnnnnnnnnnnnnnnnnnnnnnnnnnnnnnnnnnnnnnnnnnnnnnnnnnnnnnnnnnnnnnnnnnnnnnnnnnnnnnnnnnnnnnnnnnnnnnnnnnnnnnnnnnnnnnnnnnnnnnnnnnnnnnnnnnnnnnnnnnnnnnnnnnnnnnnnnnnnnnnnnnnnnnnnnnnnnnnnnnnnnnnnnnnnnnnnnnnnnnnnnnnnnnnnnnnnnnnnnnnnnnnnnnnnnnnnnnnnnnnnnnnnnnnnnnnnnnnnnnnnnnnnnnnnnnnnnnnnnnnnnnnnnnnnnnnnnnnnnnnnnnnnnnnnnnnnnnnnnnnnnnnnnnnnnnnnnnnnnnnnnnnnnnnnnnnnnnnnnnnnnnnnnnnnnnnnnnnnnnnnnnnnnnnnnnnnnnnnnnnnnnnnnnnnnnnnnnnnnnnnnnnnnnnnnnnnnnnnnnnnnnnnnnnnnnnnnnnnnnnnnnnnnnnnnnnnnnnnnnnnnnnnnnnnnnnnnnnnnnnnnnnnnnnnnnnnnnnnnnnnnnnnnnnnnnnnnnnnnnnnnnnnnnnnnnnnnnnnnnnnnnnnnnnnnnnnnnnnnnnnnnnnnnnnnnnnnnnnnnnnnnnnnnnnnnnnnnnnnnnnnnnnnnnnnnnnnnnnnnnnnnnnnnnnnnnnnnnnnnnnnnnnnnnnnnnnnnnnnnnnnnnnnnnnnnnnnnnnnnnnnnnnnnnnnnnnnnnnnnnnnnnnnnnnnnnnnnnnnnnnnnnnnnnnnnnnnnnnnnnnnnnnnnnnnnnnnnnnnnnnnnnnnnnnnnnnnnnnnnnnnnnnnnnnnnnnnnnnnnnnnnnnnnnnnnnnnnnnnnnnnnnnnnnnnnnnnnnnnnnnnnnnnnnnnnnnnnnnnnnnnnnnnnnnnnnnnnnnnnnnnnnnnnnnnnnnnnnnnnnnnnnnnnnnnnnnnnnnnnnnnnnnnnnnnnnnnnnnnnnnnnnnnnnnnnnnnnnnnnnnnnnnnnnnnnnnnnnnnnnnnnnnnnnnnnnnnnnnnnnnnnnnnnnnnnnnnnnnnnnnnnnnnnnnnnnnnnnnnnnnnnnnnnnnnnnnnnnnnnnnnnnnnnnnnnnnnnnnnnnnnnnnnnnnnnnnnnnnnnnnnnnnnnnnnnnnnnnnnnnnnnnnnnnnnnnnnnnnnnnnnnnnnnnnnnnnnnnnnnnnnnnnnnnnnnnnnnnnnnnnnnnnnnnnnnnnnnnnnnnnnnnnnnnnnnnnnnnnnnnnnnnnnnnnnnnnnnnnnnnnnnnnnnnnnnnnnnnnnnnnnnnnnnnnnnnnnnnnnnnnnnnnnnnnnnnnnnnnnnnnnnnnnnnnnnnnnnnnnnnnnnnnnnnnnnnnnnnnnnnnnnnnnnnnnnnnnnnnnnnnnnnnnnnnnnnnnnnnnnnnnnnnnnnnnnnnnnnnnnnnnnnnnnnnnnnnnnnnnnnnnnnnnnnnnnnnnnnnnnnnnnnnnnnnnnnnnnnnnnnnnnnnnnnnnnnnnnnnnnnnnnnnnnnnnnnnnnnnnnnnnnnnnnnnnnnnnnnnnnnnnnnnnnnnnnnnnnnnnnnnnnnnnnnnnnnnnnnnnnnnnnnnnnnnnnnnnnnnnnnnnnnnnnnnnnnnnnnnnnnnnnnnnnnnnnnnnnnnnnnnnnnnnnnnnnnnnnnnnnnnnnnnnnnnnnnnnnnnnnnnnnnnnnnnnnnnnnnnnnnnnnnnnnnnnnnnnnnnnnnnnnnnnnnnnnnnnnnnnnnnnnnnnnnnnnnnnnnnnnnnnnnnnnnnnnnnnnnnnnnnnnnnnnnnnnnnnnnnnnnnnnnnnnnnnnnnnnnnnnnnnnnnnnnnnnnnnnnnnnnnnnnnnnnnnnnnnnnnnnnnnnnnnnnnnnnnnnnnnnnnnnnnnnnnnnnnnnnnnnnnnnnnnnnnnnnnnnnnnnnnnnnnnnnnnnnnnnnnnnnnnnnnnnnnnnnnnnnnnnnnnnnnnnnnnnnnnnnnnnnnnnnnnnnnnnnnnnnnnnnnnnnnnnnnnnnnnnnnnnnnnnnnnnnnnnnnnnnnnnnnnnnnnnnnnnnnnnnnnnnnnnnnnnnnnnnnnnnnnnnnnnnnnnnnnnnnnnnnnnnnnnnnnnnnnnnnnnnnnnnnnnnnnnnnnnnnnnnnnnnnnnnnnnnnnnnnnnnnnnnnnnnnnnnnnnnnnnnnnnnnnnnnnnnnnnnnnnnnnnnnnnnnnnnnnnnnnnnnnnnnnnnnnnnnnnnnnnnnnnnnnnnnnnnnnnnnnnnnnnnnnnnnnnnnnnnnnnnnnnnnnnnnnnnnnnnnnnnnnnnnnnnnnnnnnnnnnnnnnnnnnnnnnnnnnnnnnnnnnnnnnnnnnnnnnnnnnnnnnnnnnnnnnnnnnnnnnnnnnnnnnnnnnnnnnnnnnnnnnnnnnnnnnnnnnnnnnnnnnnnnnnnnnnnnnnnnnnnnnnnnnnnnnnnnnnnnnnnnnnnnnnnnnnnnnnnnnnnnnnnnnnnnnnnnnnnnnnnnnnnnnnnnnnnnnnnnnnnnnnnnnnnnnnnnnnnnnnnnnnnnnnnnnnnnnnnnnnnnnnnnnnnnnnnnnnnnnnnnnnnnnnnnnnnnnnnnnnnnnnnnnnnnnnnnnnnnnnnnnnnnnnnnnnnnnnnnnnnnnnnnnnnnnnnnnnnnnnnnnnnnnnnnnnnnnnnnnnnnnnnnnnnnnnnnnnnnnnnnnnnnnnnnnnnnnnnnnnnnnnnnnnnnnnnnnnnnnnnnnnnnnnnnnnnnnnnnnnnnnnnnnnnnnnnnnnnnnnnnnnnnnnnnnnnnnnnnnnnnnnnnnnnnnnnnnnnnnnnnnnnnnnnnnnnnnnnnnnnnnnnnnnnnnnnnnnnnnnnnnnnnnnnnnnnnnnnnnnnnnnnnnnnnnnnnnnnnnnnnnnnnnnnnnnnnnnnnnnnnnnnnnnnnnnnnnnnnnnnnnnnnnnnnnnnnnnnnnnnnnnnnnnnnnnnnnnnnnnnnnnnnnnnnnnnnnnnnnnnnnnnnnnnnnnnnnnnnnnnnnnnnnnnnnnnnnnnnnnnnnnnnnnnnnnnnnnnnnnnnnnnnnnnnnnnnnnnnnnnnnnnnnnnnnnnnnnnnnnnnnnnnnnnnnnnnnnnnnnnnnnnnnnnnnnnnnnnnnnnnnnnnnnnnnnnnnnnnnnnnnnnnnnnnnnnnnnnnnnnnnnnnnnnnnnnnnnnnnnnnnnnnnnnnnnnnnnnnnnnnnnnnnnnnnnnnnnnnnnnnnnnnnnnnnnnnnnnnnnnnnnnnnnnnnnnnnnnnnnnnnnnnnnnnnnnnnnnnnnnnnnnnnnnnnnnnnnnnnnnnnnnnnnnnnnnnnnnnnnnnnnnnnnnnnnnnnnnnnnnnnnnnnnnnnnnnnnnnnnnnnnnnnnnnnnnnnnnnnnnnnnnnnnnnnnnnnnnnnnnnnnnnnnnnnnnnnnnnnnnnnnnnnnnnnnnnnnnnnnnnnnnnnnnnnnnnnnnnnnnnnnnnnnnnnnnnnnnnnnnnnnnnnnnnnnnnnnnnnnnnnnnnnnnnnnnnnnnnnnnnnnnnnnnnnnnnnnnnnnnnnnnnnnnnnnnnnnnnnnnnnnnnnnnnnnnnnnnnnnnnnnnnnnnnnnnnnnnnnnnnnnnnnnnnnnnnnnnnnnnnnnnnnnnnnnnnnnnnnnnnnnnnnnnnnnnnnnnnnnnnnnnnnnnnnnnnnnnnnnnnnnnnnnnnnnnnnnnnnnnnnnnnnnnnnnnnnnnnnnnnnnnnnnnnnnnnnnnnnnnnnnnnnnnnnnnnnnnnnnnnnnnnnnnnnnnnnnnnnnnnnnnnnnnnnnnnnnnnnnnnnnnnnnnnnnnnnnnnnnnnnnnnnnnnnnnnnnnnnnnnnnnnnnnnnnnnnnnnnnnnnnnnnnnnnnnnnnnnnnnnnnnnnnnnnnnnnnnnnnnnnnnnnnnnnnnnnnnnnnnnnnnnnnnnnnnnnnnnnnnnnnnnnnnnnnnnnnnnnnnnnnnnnnnnnnnnnnnnnnnnnnnnnnnnnnnnnnnnnnnnnnnnnnnnnnnnnnnnnnnnnnnnnnnnnnnnnnnnnnnnnnnnnnnnnnnnnnnnnnnnnnnnnnnnnnnnnnnnnnnnnnnnnnnnnnnnnnnnnnnnnnnnnnnnnnnnnnnnnnnnnnnnnnnnnnnnnnnnnnnnnnnnnnnnnnnnnnnnnnnnnnnnnnnnnnnnnnnnnnnnnnnnnnnnnnnnnnnnnnnnnnnnnnnnnnnnnnnnnnnnnnnnnnnnnnnnnnnnnnnnnnnnnnnnnnnnnnnnnnnnnnnnnnnnnnnnnnnnnnnnnnnnnnnnnnnnnnnnnnnnnnnnnnnnnnnnnnnnnnnnnnnnnnnnnnnnnnnnnnnnnnnnnnnnnnnnnnnnnnnnnnnnnnnnnnnnnnnnnnnnnnnnnnnnnnnnnnnnnnnnnnnnnnnnnnnnnnnnnnnnnnnnnnnnnnnnnnnnnnnnnnnnnnnnnnnnnnnnnnnnnnnnnnnnnnnnnnnnnnnnnnnnnnnnnnnnnnnnnnnnnnnnnnnnnnnnnnnnnnnnnnnnnnnnnnnnnnnnnnnnnnnnnnnnnnnnnnnnnnnnnnnnnnnnnnnnnnnnnnnnnnnnnnnnnnnnnnnnnnnnnnnnnnnnnnnnnnnnnnnnnnnnnnnnnnnnnnnnnnnnnnnnnnnnnnnnnnnnnnnnnnnnnnnnnnnnnnnnnnnnnnnnnnnnnnnnnnnnnnnnnnnnnnnnnnnnnnnnnnnnnnnnnnnnnnnnnnnnnnnnnnnnnnnnnnnnnnnnnnnnnnnnnnnnnnnnnnnnnnnnnnnnnnnnnnnnnnnnnnnnnnnnnnnnnnnnnnnnnnnnnnnnnnnnnnnnnnnnnnnnnnnnnnnnnnnnnnnnnnnnnnnnnnnnnnnnnnnnnnnnnnnnnnnnnnnnnnnnnnnnnnnnnnnnnnnnnnnnnnnnnnnnnnnnnnnnnnnnnnnnnnnnnnnnnnnnnnnnnnnnnnnnnnnnnnnnnnnnnnnnnnnnnnnnnnnnnnnnnnnnnnnnnnnnnnnnnnnnnnnnnnnnnnnnnnnnnnnnnnnnnnnnnnnnnnnnnnnnnnnnnnnnnnnnnnnnnnnnnnnnnnnnnnnnnnnnnnnnnnnnnnnnnnnnnnnnnnnnnnnnnnnnnnnnnnnnnnnnnnnnnnnnnnnnnnnnnnnnnnnnnnnnnnnnnnnnnnnnnnnnnnnnnnnnnnnnnnnnnnnnnnnnnnnnnnnnnnnnnnnnnnnnnnnnnnnnnnnnnnnnnnnnnnnnnnnnnnnnnnnnnnnnnnnnnnnnnnnnnnnnnnnnnnnnnnnnnnnnnnnnnnnnnnnnnnnnnnnnnnnnnnnnnnnnnnnnnnnnnnnnnnnnnnnnnnnnnnnnnnnnnnnnnnnnnnnnnnnnnnnnnnnnnnnnnnnnnnnnnnnnnnnnnnnnnnnnnnnnnnnnnnnnnnnnnnnnnnnnnnnnnnnnnnnnnnnnnnnnnnnnnnnnnnnnnnnnnnnnnnnnnnnnnnnnnnnnnnnnnnnnnnnnnnnnnnnnnnnnnnnnnnnnnnnnnnnnnnnnnnnnnnnnnnnnnnnnnnnnnnnnnnnnnnnnnnnnnnnnnnnnnnnnnnnnnnnnnnnnnnnnnnnnnnnnnnnnnnnnnnnnnnnnnnnnnnnnnnnnnnnnnnnnnnnnnnnnnnnnnnnnnnnnnnnnnnnnnnnnnnnnnnnnnnnnnnnnnnnnnnnnnnnnnnnnnnnnnnnnnnnnnnnnnnnnnnnnnnnnnnnnnnnnnnnnnnnnnnnnnnnnnnnnnnnnnnnnnnnnnnnnnnnnnnnnnnnnnnnnnnnnnnnnnnnnnnnnnnnnnnnnnnnnnnnnnnnnnnnnnnnnnnnnnnnnnnnnnnnnnnnnnnnnnnnnnnnnnnnnnnnnnnnnnnnnnnnnnnnnnnnnnnnnnnnnnnnnnnnnnnnnnnnnnnnnnnnnnnnnnnnnnnnnnnnnnnnnnnnnnnnnnnnnnnnnnnnnnnnnnnnnnnnnnnnnnnnnnnnnnnnnnnnnnnnnnnnnnnnnnnnnnnnnnnnnnnnnnnnnnnnnnnnnnnnnnnnnnnnnnnnnnnnnnnnnnnnnnnnnnnnnnnnnnnnnnnnnnnnnnnnnnnnnnnnnnnnnnnnnnnnnnnnnnnnnnnnnnnnnnnnnnnnnnnnnnnnnnnnnnnnnnnnnnnnnnnnnnnnnnnnnnnnnnnnnnnnnnnnnnnnnnnnnnnnnnnnnnnnnnnnnnnnnnnnnnnnnnnnnnnnnnnnnnnnnnnnnnnnnnnnnnnnnnnnnnnnnnnnnnnnnnnnnnnnnnnnnnnnnnnnnnnnnnnnnnnnnnnnnnnnnnnnnnnnnnnnnnnnnnnnnnnnnnnnnnnnnnnnnnnnnnnnnnnnnnnnnnnnnnnnnnnnnnnnnnnnnnnnnnnnnnnnnnnnnnnnnnnnnnnnnnnnnnnnnnnnnnnnnnnnnnnnnnnnnnnnnnnnnnnnnnnnnnnnnnnnnnnnnnnnnnnnnnnnnnnnnnnnnnnnnnnnnnnnnnnnnnnnnnnnnnnnnnnnnnnnnnnnnnnnnnnnnnnnnnnnnnnnnnnnnnnnnnnnnnnnnnnnnnnnnnnnnnnnnnnnnnnnnnnnnnnnnnnnnnnnnnnnnnnnnnnnnnnnnnnnnnnnnnnnnnnnnnnnnnnnnnnnnnnnnnnnnnnnnnnnnnnnnnnnnnnnnnnnnnnnnnnnnnnnnnnnnnnnnnnnnnnnnnnnnnnnnnnnnnnnnnnnnnnnnnnnnnnnnnnnnnnnnnnnnnnnnnnnnnnnnnnnnnnnnnnnnnnnnnnnnnnnnnnnnnnnnnnnnnnnnnnnnnnnnnnnnnnnnnnnnnnnnnnnnnnnnnnnnnnnnnnnnnnnnnnnnnnnnnnnnnnnnnnnnnnnnnnnnnnnnnnnnnnnnnnnnnnnnnnnnnnnnnnnnnnnnnnnnnnnnnnnnnnnnnnnnnnnnnnnnnnnnnnnnnnnnnnnnnnnnnnnnnnnnnnnnnnnnnnnnnnnnnnnnnnnnnnnnnnnnnnnnnnnnnnnnnnnnnnnnnnnnnnnnnnnnnnnnnnnnnnnnnnnnnnnnnnnnnnnnnnnnnnnnnnnnnnnnnnnnnnnnnnnnnnnnnnnnnnnnnnnnnnnnnnnnnnnnnnnnnnnnnnnnnnnnnnnnnnnnnnnnnnnnnnnnnnnnnnnnnnnnnnnnnnnnnnnnnnnnnnnnnnnnnnnnnnnnnnnnnnnnnnnnnnnnnnnnnnnnnnnnnnnnnnnnnnnnnnnnnnnnnnnnnnnnnnnnnnnnnnnnnnnnnnnnnnnnnnnnnnnnnnnnnnnnnnnnnnnnnnnnnnnnnnnnnnnnnnnnnnnnnnnnnnnnnnnnnnnnnnnnnnnnnnnnnnnnnnnnnnnnnnnnnnnnnnnnnnnnnnnnnnnnnnnnnnnnnnnnnnnnnnnnnnnnnnnnnnnnnnnnnnnnnnnnnnnnnnnnnnnnnnnnnnnnnnnnnnnnnnnnnnnnnnnnnnnnnnnnnnnnnnnnnnnnnnnnnnnnnnnnnnnnnnnnnnnnnnnnnnnnnnnnnnnnnnnnnnnnnnnnnnnnnnnnnnnnnnnnnnnnnnnnnnnnnnnnnnnnnnnnnnnnnnnnnnnnnnnnnnnnnnnnnnnnnnnnnnnnnnnnnnnnnnnnnnnnnnnnnnnnnnnnnnnnnnnnnnnnnnnnnnnnnnnnnnnnnnnnnnnnnnnnnnnnnnnnnnnnnnnnnnnnnnnnnnnnnnnnnnnnnnnnnnnnnnnnnnnnnnnnnnnnnnnnnnnnnnnnnnnnnnnnnnnnnnnnnnnnnnnnnnnnnnnnnnnnnnnnnnnnnnnnnnnnnnnnnnnnnnnnnnnnnnnnnnnnnnnnnnnnnnnnnnnnnnnnnnnnnnnnnnnnnnnnnnnnnnnnnnnnnnnnnnnnnnnnnnnnnnnnnnnnnnnnnnnnnnnnnnnnnnnnnnnnnnnnnnnnnnnnnnnnnnnnnnnnnnnnnnnnnnnnnnnnnnnnnnnnnnnnnnnnnnnnnnnnnnnnnnnnnnnnnnnnnnnnnnnnnnnnnnnnnnnnnnnnnnnnnnnnnnnnnnnnnnnnnnnnnnnnnnnnnnnnnnnnnnnnnnnnnnnnnnnnnnnnnnnnnnnnnnnnnnnnnnnnnnnnnnnnnnnnnnnnnnnnnnnnnnnnnnnnnnnnnnnnnnnnnnnnnnnnnnnnnnnnnnnnnnnnnnnnnnnnnnnnnnnnnnnnnnnnnnnnnnnnnnnnnnnnnnnnnnnnnnnnnnnnnnnnnnnnnnnnnnnnnnnnnnnnnnnnnnnnnnnnnnnnnnnnnnnnnnnnnnnnnnnnnnnnnnnnnnnnnnnnnnnnnnnnnnnnnnnnnnnnnnnnnnnnnnnnnnnnnnnnnnnnnnnnnnnnnnnnnnnnnnnnnnnnnnnnnnnnnnnnnnnnnnnnnnnnnnnnnnnnnnnnnnnnnnnnnnnnnnnnnnnnnnnnnnnnnnnnnnnnnnnnnnnnnnnnnnnnnnnnnnnnnnnnnnnnnnnnnnnnnnnnnnnnnnnnnnnnnnnnnnnnnnnnnnnnnnnnnnnnnnnnnnnnnnnnnnnnnnnnnnnnnnnnnnnnnnnnnnnnnnnnnnnnnnnnnnnnnnnnnnnnnnnnnnnnnnnnnnnnnnnnnnnnnnnnnnnnnnnnnnnnnnnnnnnnnnnnnnnnnnnnnnnnnnnnnnnnnnnnnnnnnnnnnnnnnnnnnnnnnnnnnnnnnnnnnnnnnnnnnnnnnnnnnnnnnnnnnnnnnnnnnnnnnnnnnnnnnnnnnnnnnnnnnnnnnnnnnnnnnnnnnnnnnnnnnnnnnnnnnnnnnnnnnnnnnnnnnnnnnnnnnnnnnnnnnnnnnnnnnnnnnnnnnnnnnnnnnnnnnnnnnnnnnnnnnnnnnnnnnnnnnnnnnnnnnnnnnnnnnnnnnnnnnnnnnnnnnnnnnnnnnnnnnnnnnnnnnnnnnnnnnnnnnnnnnnnnnnnnnnnnnnnnnnnnnnnnnnnnnnnnnnnnnnnnnnnnnnnnnnnnnnnnnnnnnnnnnnnnnnnnnnnnnnnnnnnnnnnnnnnnnnnnnnnnnnnnnnnnnnnnnnnnnnnnnnnnnnnnnnnnnnnnnnnnnnnnnnnnnnnnnnnnnnnnnnnnnnnnnnnnnnnnnnnnnnnnnnnnnnnnnnnnnnnnnnnnnnnnnnnnnnnnnnnnnnnnnnnnnnnnnnnnnnnnnnnnnnnnnnnnnnnnnnnnnnnnnnnnnnnnnnnnnnnnnnnnnnnnnnnnnnnnnnnnnnnnnnnnnnnnnnnnnnnnnnnnnnnnnnnnnnnnnnnnnnnnnnnnnnnnnnnnnnnnnnnnnnnnnnnnnnnnnnnnnnnnnnnnnnnnnnnnnnnnnnnnnnnnnnnnnnnnnnnnnnnnnnnnnnnnnnnnnnnnnnnnnnnnnnnnnnnnnnnnnnnnnnnnnnnnnnnnnnnnnnnnnnnnnnnnnnnnnnnnnnnnnnnnnnnnnnnnnnnnnnnnnnnnnnnnnnnnnnnnnnnnnnnnnnnnnnnnnnnnnnnnnnnnnnnnnnnnnnnnnnnnnnnnnnnnnnnnnnnnnnnnnnnnnnnnnnnnnnnnnnnnnnnnnnnnnnnnnnnnnnnnnnnnnnnnnnnnnnnnnnnnnnnnnnnnnnnnnnnnnnnnnnnnnnnnnnnnnnnnnnnnnnnnnnnnnnnnnnnnnnnnnnnnnnnnnnnnnnnnnnnnnnnnnnnnnnnnnnnnnnnnnnnnnnnnnnnnnnnnnnnnnnnnnnnnnnnnnnnnnnnnnnnnnnnnnnnnnnnnnnnnnnnnnnnnnnnnnnnnnnnnnnnnnnnnnnnnnnnnnnnnnnnnnnnnnnnnnnnnnnnnnnnnnnnnnnnnnnnnnnnnnnnnnnnnnnnnnnnnnnnnnnnnnnnnnnnnnnnnnnnnnnnnnnnnnnnnnnnnnnnnnnnnnnnnnnnnnnnnnnnnnnnnnnnnnnnnnnnnnnnnnnnnnnnnnnnnnnnnnnnnnnnnnnnnnnnnnnnnnnnnnnnnnnnnnnnnnnnnnnnnnnnnnnnnnnnnnnnnnnnnnnnnnnnnnnnnnnnnnnnnnnnnnnnnnnnnnnnnnnnnnnnnnnnnnnnnnnnnnnnnnnnnnnnnnnnnnnnnnnnnnnnnnnnnnnnnnnnnnnnnnnnnnnnnnnnnnnnnnnnnnnnnnnnnnnnnnnnnnnnnnnnnnnnnnnnnnnnnnnnnnnnnnnnnnnnnnnnnnnnnnnnnnnnnnnnnnnnnnnnnnnnnnnnnnnnnnnnnnnnnnnnnnnnnnnnnnnnnnnnnnnnnnnnnnnnnnnnnnnnnnnnnnnnnnnnnnnnnnnnnnnnnnnnnnnnnnnnnnnnnnnnnnnnnnnnnnnnnnnnnnnnnnnnnnnnnnnnnnnnnnnnnnnnnnnnnnnnnnnnnnnnnnnnnnnnnnnnnnnnnnnnnnnnnnnnnnnnnnnnnnnnnnnnnnnnnnnnnnnnnnnnnnnnnnnnnnnnnnnnnnnnnnnnnnnnnnnnnnnnnnnnnnnnnnnnnnnnnnnnnnnnnnnnnnnnnnnnnnnnnnnnnnnnnnnnnnnnnnnnnnnnnnnnnnnnnnnnnnnnnnnnnnnnnnnnnnnnnnnnnnnnnnnnnnnnnnnnnnnnnnnnnnnnnnnnnnnnnnnnnnnnnnnnnnnnnnnnnnnnnnnnnnnnnnnnnnnnnnnnnnnnnnnnnnnnnnnnnnnnnnnnnnnnnnnnnnnnnnnnnnnnnnnnnnnnnnnnnnnnnnnnnnnnnnnnnnnnnnnnnnnnnnnnnnnnnnnnnnnnnnnnnnnnnnnnnnnnnnnnnnnnnnnnnnnnnnnnnnnnnnnnnnnnnnnnnnnnnnnnnnnnnnnnnnnnnnnnnnnnnnnnnnnnnnnnnnnnnnnnnnnnnnnnnnnnnnnnnnnnnnnnnnnnnnnnnnnnnnnnnnnnnnnnnnnnnnnnnnnnnnnnnnnnnnnnnnnnnnnnnnnnnnnnnnnnnnnnnnnnnnnnnnnnnnnnnnnnnnnnnnnnnnnnnnnnnnnnnnnnnnnnnnnnnnnnnnnnnnnnnnnnnnnnnnnnnnnnnnnnnnnnnnnnnnnnnnnnnnnnnnnnnnnnnnnnnnnnnnnnnnnnnnnnnnnnnnnnnnnnnnnnnnnnnnnnnnnnnnnnnnnnnnnnnnnnnnnnnnnnnnnnnnnnnnnnnnnnnnnnnnnnnnnnnnnnnnnnnnnnnnnnnnnnnnnnnnnnnnnnnnnnnnnnnnnnnnnnnnnnnnnnnnnnnnnnnnnnnnnnnnnnnnnnnnnnnnnnnnnnnnnnnnnnnnnnnnnnnnnnnnnnnnnnnnnnnnnnnnnnnnnnnnnnnnnnnnnnnnnnnnnnnnnnnnnnnnnnnnnnnnnnnnnnnnnnnnnnnnnnnnnnnnnnnnnnnnnnnnnnnnnnnnnnnnnnnnnnnnnnnnnnnnnnnnnnnnnnnnnnnnnnnnnnnnnnnnnnnnnnnnnnnnnnnnnnnnnnnnnnnnnnnnnnnnnnnnnnnnnnnnnnnnnnnnnnnnnnnnnnnnnnnnnnnnnnnnnnnnnnnnnnnnnnnnnnnnnnnnnnnnnnnnnnnnnnnnnnnnnnnnnnnnnnnnnnnnnnnnnnnnnnnnnnnnnnnnnnnnnnnnnnnnnnnnnnnnnnnnnnnnnnnnnnnnnnnnnnnnnnnnnnnnnnnnnnnnnnnnnnnnnnnnnnnnnnnnnnnnnnnnnnnnnnnnnnnnnnnnnnnnnnnnnnnnnnnnnnnnnnnnnnnnnnnnnnnnnnnnnnnnnnnnnnnnnnnnnnnnnnnnnnnnnnnnnnnnnnnnnnnnnnnnnnnnnnnnnnnnnnnnnnnnnnnnnnnnnnnnnnnnnnnnnnnnnnnnnnnnnnnnnnnnnnnnnnnnnnnnnnnnnnnnnnnnnnnnnnnnnnnnnnnnnnnnnnnnnnnnnnnnnnnnnnnnnnnnnnnnnnnnnnnnnnnnnnnnnnnnnnnnnnnnnnnnnnnnnnnnnnnnnnnnnnnnnnnnnnnnnnnnnnnnnnnnnnnnnnnnnnnnnnnnnnnnnnnnnnnnnnnnnnnnnnnnnnnnnnnnnnnnnnnnnnnnnnnnnnnnnnnnnnnnnnnnnnnnnnnnnnnnnnnnnnnnnnnnnnnnnnnnnnnnnnnnnnnnnnnnnnnnnnnnnnnnnnnnnnnnnnnnnnnnnnnnnnnnnnnnnnnnnnnnnnnnnnnnnnnnnnnnnnnnnnnnnnnnnnnnnnnnnnnnnnnnnnnnnnnnnnnnnnnnnnnnnnnnnnnnnnnnnnnnnnnnnnnnnnnnnnnnnnnnnnnnnnnnnnnnnnnnnnnnnnnnnnnnnnnnnnnnnnnnnnnnnnnnnnnnnnnnnnnnnnnnnnnnnnnnnnnnnnnnnnnnnnnnnnnnnnnnnnnnnnnnnnnnnnnnnnnnnnnnnnnnnnnnnnnnnnnnnnnnnnnnnnnnnnnnnnnnnnnnnnnnnnnnnnnnnnnnnnnnnnnnnnnnnnnnnnnnnnnnnnnnnnnnnnnnnnnnnnnnnnnnnnnnnnnnnnnnnnnnnnnnnnnnnnnnnnnnnnnnnnnnnnnnnnnnnnnnnnnnnnnnnnnnnnnnnnnnnnnnnnnnnnnnnnnnnnnnnnnnnnnnnnnnnnnnnnnnnnnnnnnnnnnnnnnnnnnnnnnnnnnnnnnnnnnnnnnnnnnnnnnnnnnnnnnnnnnnnnnnnnnnnnnnnnnnnnnnnnnnnnnnnnnnnnnnnnnnnnnnnnnnnnnnnnnnnnnnnnnnnnnnnnnnnnnnnnnnnnnnnnnnnnnnnnnnnnnnnnnnnnnnnnnnnnnnnnnnnnnnnnnnnnnnnnnnnnnnnnnnnnnnnnnnnnnnnnnnnnnnnnnnnnnnnnnnnnnnnnnnnnnnnnnnnnnnnnnnnnnnnnnnnnnnnnnnnnnnnnnnnnnnnnnnnnnnnnnnnnnnnnnnnnnnnnnnnnnnnnnnnnnnnnnnnnnnnnnnnnnnnnnnnnnnnnnnnnnnnnnnnnnnnnnnnnnnnnnnnnnnnnnnnnnnnnnnnnnnnnnnnnnnnnnnnnnnnnnnnnnnnnnnnnnnnnnnnnnnnnnnnnnnnnnnnnnnnnnnnnnnnnnnnnnnnnnnnnnnnnnnnnnnnnnnnnnnnnnnnnnnnnnnnnnnnnnnnnnnnnnnnnnnnnnnnnnnnnnnnnnnnnnnnnnnnnnnnnnnnnnnnnnnnnnnnnnnnnnnnnnnnnnnnnnnnnnnnnnnnnnnnnnnnnnnnnnnnnnnnnnnnnnnnnnnnnnnnnnnnnnnnnnnnnnnnnnnnnnnnnnnnnnnnnnnnnnnnnnnnnnnnnnnnnnnnnnnnnnnnnnnnnnnnnnnnnnnnnnnnnnnnnnnnnnnnnnnnnnnnnnnnnnnnnnnnnnnnnnnnnnnnnnnnnnnnnnnnnnnnnnnnnnnnnnnnnnnnnnnnnnnnnnnnnnnnnnnnnnnnnnnnnnnnnnnnnnnnnnnnnnnnnnnnnnnnnnnnnnnnnnnnnnnnnnnnnnnnnnnnnnnnnnnnnnnnnnnnnnnnnnnnnnnnnnnnnnnnnnnnnnnnnnnnnnnnnnnnnnnnnnnnnnnnnnnnnnnnnnnnnnnnnnnnnnnnnnnnnnnnnnnnnnnnnnnnnnnnnnnnnnnnnnnnnnnnnnnnnnnnnnnnnnnnnnnnnnnnnnnnnnnnnnnnnnnnnnnnnnnnnnnnnnnnnnnnnnnnnnnnnnnnnnnnnnnnnnnnnnnnnnnnnnnnnnnnnnnnnnnnnnnnnnnnnnnnnnnnnnnnnnnnnnnnnnnnnnnnnnnnnnnnnnnnnnnnnnnnnnnnnnnnnnnnnnnnnnnnnnnnnnnnnnnnnnnnnnnnnnnnnnnnnnnnnnnnnnnnnnnnnnnnnnnnnnnnnnnnnnnnnnnnnnnnnnnnnnnnnnnnnnnnnnnnnnnnnnnnnnnnnnnnnnnnnnnnnnnnnnnnnnnnnnnnnnnnnnnnnnnnnnnnnnnnnnnnnnnnnnnnnnnnnnnnnnnnnnnnnnnnnnnnnnnnnnnnnnnnnnnnnnnnnnnnnnnnnnnnnnnnnnnnnnnnnnnnnnnnnnnnnnnnnnnnnnnnnnnnnnnnnnnnnnnnnnnnnnnnnnnnnnnnnnnnnnnnnnnnnnnnnnnnnnnnnnnnnnnnnnnnnnnnnnnnnnnnnnnnnnnnnnnnnnnnnnnnnnnnnnnnnnnnnnnnnnnnnnnnnnnnnnnnnnnnnnnnnnnnnnnnnnnnnnnnnnnnnnnnnnnnnnnnnnnnnnnnnnnnnnnnnnnnnnnnnnnnnnnnnnnnnnnnnnnnnnnnnnnnnnnnnnnnnnnnnnnnnnnnnnnnnnnnnnnnnnnnnnnnnnnnnnnnnnnnnnnnnnnnnnnnnnnnnnnnnnnnnnnnnnnnnnnnnnnnnnnnnnnnnnnnnnnnnnnnnnnnnnnnnnnnnnnnnnnnnnnnnnnnnnnnnnnnnnnnnnnnnnnnnnnnnnnnnnnnnnnnnnnnnnnnnnnnnnnnnnnnnnnnnnnnnnnnnnnnnnnnnnnnnnnnnnnnnnnnnnnnnnnnnnnnnnnnnnnnnnnnnnnnnnnnnnnnnnnnnnnnnnnnnnnnnnnnnnnnnnnnnnnnnnnnnnnnnnnnnnnnnnnnnnnnnnnnnnnnnnnnnnnnnnnnnnnnnnnnnnnnnnnnnnnnnnnnnnnnnnnnnnnnnnnnnnnnnnnnnnnnnnnnnnnnnnnnnnnnnnnnnnnnnnnnnnnnnnnnnnnnnnnnnnnnnnnnnnnnnnnnnnnnnnnnnnnnnnnnnnnnnnnnnnnnnnnnnnnnnnnnnnnnnnnnnnnnnnnnnnnnnnnnnnnnnnnnnnnnnnnnnnnnnnnnnnnnnnnnnnnnnnnnnnnnnnnnnnnnnnnnnnnnnnnnnnnnnnnnnnnnnnnnnnnnnnnnnnnnnnnnnnnnnnnnnnnnnnnnnnnnnnnnnnnnnnnnnnnnnnnnnnnnnnnnnnnnnnnnnnnnnnnnnnnnnnnnnnnnnnnnnnnnnnnnnnnnnnnnnnnnnnnnnnnnnnnnnnnnnnnnnnnnnnnnnnnnnnnnnnnnnnnnnnnnnnnnnnnnnnnnnnnnnnnnnnnnnnnnnnnnnnnnnnnnnnnnnnnnnnnnnnnnnnnnnnnnnnnnnnnnnnnnnnnnnnnnnnnnnnnnnnnnnnnnnnnnnnnnnnnnnnnnnnnnnnnnnnnnnnnnnnnnnnnnnnnnnnnnnnnnnnnnnnnnnnnnnnnnnnnnnnnnnnnnnnnnnnnnnnnnnnnnnnnnnnnnnnnnnnnnnnnnnnnnnnnnnnnnnnnnnnnnnnnnnnnnnnnnnnnnnnnnnnnnnnnnnnnnnnnnnnnnnnnnnnnnnnnnnnnnnnnnnnnnnnnnnnnnnnnnnnnnnnnnnnnnnnnnnnnnnnnnnnnnnnnnnnnnnnnnnnnnnnnnnnnnnnnnnnnnnnnnnnnnnnnnnnnnnnnnnnnnnnnnnnnnnnnnnnnnnnnnnnnnnnnnnnnnnnnnnnnnnnnnnnnnnnnnnnnnnnnnnnnnnnnnnnnnnnnnnnnnnnnnnnnnnnnnnnnnnnnnnnnnnnnnnnnnnnnnnnnnnnnnnnnnnnnnnnnnnnnnnnnnnnnnnnnnnnnnnnnnnnnnnnnnnnnnnnnnnnnnnnnnnnnnnnnnnnnnnnnnnnnnnnnnnnnnnnnnnnnnnnnnnnnnnnnnnnnnnnnnnnnnnnnnnnnnnnnnnnnnnnnnnnnnnnnnnnnnnnnnnnnnnnnnnnnnnnnnnnnnnnnnnnnnnnnnnnnnnnnnnnnnnnnnnnnnnnnnnnnnnnnnnnnnnnnnnnnnnnnnnnnnnnnnnnnnnnnnnnnnnnnnnnnnnnnnnnnnnnnnnnnnnnnnnnnnnnnnnnnnnnnnnnnnnnnnnnnnnnnnnnnnnnnnnnnnnnnnnnnnnnnnnnnnnnnnnnnnnnnnnnnnnnnnnnnnnnnnnnnnnnnnnnnnnnnnnnnnnnnnnnnnnnnnnnnnnnnnnnnnnnnnnnnnnnnnnnnnnnnnnnnnnnnnnnnnnnnnnnnnnnnnnnnnnnnnnnnnnnnnnnnnnnnnnnnnnnnnnnnnnnnnnnnnnnnnnnnnnnnnnnnnnnnnnnnnnnnnnnnnnnnnnnnnnnnnnnnnnnnnnnnnnnnnnnnnnnnnnnnnnnnnnnnnnnnnnnnnnnnnnnnnnnnnnnnnnnnnnnnnnnnnnnnnnnnnnnnnnnnnnnnnnnnnnnnnnnnnnnnnnnnnnnnnnnnnnnnnnnnnnnnnnnnnnnnnnnnnnnnnnnnnnnnnnnnnnnnnnnnnnnnnnnnnnnnnnnnnnnnnnnnnnnnnnnnnnnnnnnnnnnnnnnnnnnnnnnnnnnnnnnnnnnnnnnnnnnnnnnnnnnnnnnnnnnnnnnnnnnnnnnnnnnnnnnnnnnnnnnnnnnnnnnnnnnnnnnnnnnnnnnnnnnnnnnnnnnnnnnnnnnnnnnnnnnnnnnnnnnnnnnnnnnnnnnnnnnnnnnnnnnnnnnnnnnnnnnnnnnnnnnnnnnnnnnnnnnnnnnnnnnnnnnnnnnnnnnnnnnnnnnnnnnnnnnnnnnnnnnnnnnnnnnnnnnnnnnnnnnnnnnnnnnnnnnnnnnnnnnnnnnnnnnnnnnnnnnnnnnnnnnnnnnnnnnnnnnnnnnnnnnnnnnnnnnnnnnnnnnnnnnnnnnnnnnnnnnnnnnnnnnnnnnnnnnnnnnnnnnnnnnnnnnnnnnnnnnnnnnnnnnnnnnnnnnnnnnnnnnnnnnnnnnnnnnnnnnnnnnnnnnnnnnnnnnnnnnnnnnnnnnnnnnnnnnnnnnnnnnnnnnnnnnnnnnnnnnnnnnnnnnnnnnnnnnnnnnnnnnnnnnnnnnnnnnnnnnnnnnnnnnnnnnnnnnnnnnnnnnnnnnnnnnnnnnnnnnnnnnnnnnnnnnnnnnnnnnnnnnnnnnnnnnnnnnnnnnnnnnnnnnnnnnnnnnnnnnnnnnnnnnnnnnnnnnnnnnnnnnnnnnnnnnnnnnnnnnnnnnnnnnnnnnnnnnnnnnnnnnnnnnnnnnnnnnnnnnnnnnnnnnnnnnnnnnnnnnnnnnnnnnnnnnnnnnnnnnnnnnnnnnnnnnnnnnnnnnnnnnnnnnnnnnnnnnnnnnnnnnnnnnnnnnnnnnnnnnnnnnnnnnnnnnnnnnnnnnnnnnnnnnnnnnnnnnnnnnnnnnnnnnnnnnnnnnnnnnnnnnnnnnnnnnnnnnnnnnnnnnnnnnnnnnnnnnnnnnnnnnnnnnnnnnnnnnnnnnnnnnnnnnnnnnnnnnnnnnnnnnnnnnnnnnnnnnnnnnnnnnnnnnnnnnnnnnnnnnnnnnnnnnnnnnnnnnnnnnnnnnnnnnnnnnnnnnnnnnnnnnnnnnnnnnnnnnnnnnnnnnnnnnnnnnnnnnnnnnnnnnnnnnnnnnnnnnnnnnnnnnnnnnnnnnnnnnnnnnnnnnnnnnnnnnnnnnnnnnnnnnnnnnnnnnnnnnnnnnnnnnnnnnnnnnnnnnnnnnnnnnnnnnnnnnnnnnnnnnnnnnnnnnnnnnnnnnnnnnnnnnnnnnnnnnnnnnnnnnnnnnnnnnnnnnnnnnnnnnnnnnnnnnnnnnnnnnnnnnnnnnnnnnnnnnnnnnnnnnnnnnnnnnnnnnnnnnnnnnnnnnnnnnnnnnnnnnnnnnnnnnnnnnnnnnnnnnnnnnnnnnnnnnnnnnnnnnnnnnnnnnnnnnnnnnnnnnnnnnnnnnnnnnnnnnnnnnnnnnnnnnnnnnnnnnnnnnnnnnnnnnnnnnnnnnnnnnnnnnnnnnnnnnnnnnnnnnnnnnnnnnnnnnnnnnnnnnnnnnnnnnnnnnnnnnnnnnnnnnnnnnnnnnnnnnnnnnnnnnnnnnnnnnnnnnnnnnnnnnnnnnnnnnnnnnnnnnnnnnnnnnnnnnnnnnnnnnnnnnnnnnnnnnnnnnnnnnnnnnnnnnnnnnnnnnnnnnnnnnnnnnnnnnnnnnnnnnnnnnnnnnnnnnnnnnnnnnnnnnnnnnnnnnnnnnnnnnnnnnnnnnnnnnnnnnnnnnnnnnnnnnnnnnnnnnnnnnnnnnnnnnnnnnnnnnnnnnnnnnnnnnnnnnnnnnnnnnnnnnnnnnnnnnnnnnnnnnnnnnnnnnnnnnnnnnnnnnnnnnnnnnnnnnnnnnnnnnnnnnnnnnnnnnnnnnnnnnnnnnnnnnnnnnnnnnnnnnnnnnnnnnnnnnnnnnnnnnnnnnnnnnnnnnnnnnnnnnnnnnnnnnnnnnnnnnnnnnnnnnnnnnnnnnnnnnnnnnnnnnnnnnnnnnnnnnnnnnnnnnnnnnnnnnnnnnnnnnnnnnnnnnnnnnnnnnnnnnnnnnnnnnnnnnnnnnnnnnnnnnnnnnnnnnnnnnnnnnnnnnnnnnnnnnnnnnnnnnnnnnnnnnnnnnnnnnnnnnnnnnnnnnnnnnnnnnnnnnnnnnnnnnnnnnnnnnnnnnnnnnnnnnnnnnnnnnnnnnnnnnnnnnnnnnnnnnnnnnnnnnnnnnnnnnnnnnnnnnnnnnnnnnnnnnnnnnnnnnnnnnnnnnnnnnnnnnnnnnnnnnnnnnnnnnnnnnnnnnnnnnnnnnnnnnnnnnnnnnnnnnnnnnnnnnnnnnnnnnnnnnnnnnnnnnnnnnnnnnnnnnnnnnnnnnnnnnnnnnnnnnnnnnnnnnnnnnnnnnnnnnnnnnnnnnnnnnnnnnnnnnnnnnnnnnnnnnnnnnnnnnnnnnnnnnnnnnnnnnnnnnnnnnnnnnnnnnnnnnnnnnnnnnnnnnnnnnnnnnnnnnnnnnnnnnnnnnnnnnnnnnnnnnnnnnnnnnnnnnnnnnnnnnnnnnnnnnnnnnnnnnnnnnnnnnnnnnnnnnnnnnnnnnnnnnnnnnnnnnnnnnnnnnnnnnnnnnnnnnnnnnnnnnnnnnnnnnnnnnnnnnnnnnnnnnnnnnnnnnnnnnnnnnnnnnnnnnnnnnnnnnnnnnnnnnnnnnnnnnnnnnnnnnnnnnnnnnnnnnnnnnnnnnnnnnnnnnnnnnnnnnnnnnnnnnnnnnnnnnnnnnnnnnnnnnnnnnnnnnnnnnnnnnnnnnnnnnnnnnnnnnnnnnnnnnnnnnnnnnnnnnnnnnnnnnnnnnnnnnnnnnnnnnnnnnnnnnnnnnnnnnnnnnnnnnnnnnnnnnnnnnnnnnnnnnnnnnnnnnnnnnnnnnnnnnnnnnnnnnnnnnnnnnnnnnnnnnnnnnnnnnnnnnnnnnnnnnnnnnnnnnnnnnnnnnnnnnnnnnnnnnnnnnnnnnnnnnnnnnnnnnnnnnnnnnnnnnnnnnnnnnnnnnnnnnnnnnnnnnnnnnnnnnnnnnnnnnnnnnnnnnnnnnnnnnnnnnnnnnnnnnnnnnnnnnnnnnnnnnnnnnnnnnnnnnnnnnnnnnnnnnnnnnnnnnnnnnnnnnnnnnnnnnnnnnnnnnnnnnnnnnnnnnnnnnnnnnnnnnnnnnnnnnnnnnnnnnnnnnnnnnnnnnnnnnnnnnnnnnnnnnnnnnnnnnnnnnnnnnnnnnnnnnnnnnnnnnnnnnnnnnnnnnnnnnnnnnnnnnnnnnnnnnnnnnnnnnnnnnnnnnnnnnnnnnnnnnnnnnnnnnnnnnnnnnnnnnnnnnnnnnnnnnnnnnnnnnnnnnnnnnnnnnnnnnnnnnnnnnnnnnnnnnnnnnnnnnnnnnnnnnnnnnnnnnnnnnnnnnnnnnnnnnnnnnnnnnnnnnnnnnnnnnnnnnnnnnnnnnnnnnnnnnnnnnnnnnnnnnnnnnnnnnnnnnnnnnnnnnnnnnnnnnnnnnnnnnnnnnnnnnnnnnnnnnnnnnnnnnnnnnnnnnnnnnnnnnnnnnnnnnnnnnnnnnnnnnnnnnnnnnnnnnnnnnnnnnnnnnnnnnnnnnnnnnnnnnnnnnnnnnnnnnnnnnnnnnnnnnnnnnnnnnnnnnnnnnnnnnnnnnnnnnnnnnnnnnnnnnnnnnnnnnnnnnnnnnnnnnnnnnnnnnnnnnnnnnnnnnnnnnnnnnnnnnnnnnnnnnnnnnnnnnnnnnnnnnnnnnnnnnnnnnnnnnnnnnnnnnnnnnnnnnnnnnnnnnnnnnnnnnnnnnnnnnnnnnnnnnnnnnnnnnnnnnnnnnnnnnnnnnnnnnnnnnnnnnnnnnnnnnnnnnnnnnnnnnnnnnnnnnnnnnnnnnnnnnnnnnnnnnnnnnnnnnnnnnnnnnnnnnnnnnnnnnnnnnnnnnnnnnnnnnnnnnnnnnnnnnnnnnnnnnnnnnnnnnnnnnnnnnnnnnnnnnnnnnnnnnnnnnnnnnnnnnnnnnnnnnnnnnnnnnnnnnnnnnnnnnnnnnnnnnnnnnnnnnnnnnnnnnnnnnnnnnnnnnnnnnnnnnnnnnnnnnnnnnnnnnnnnnnnnnnnnnnnnnnnnnnnnnnnnnnnnnnnnnnnnnnnnnnnnnnnnnnnnnnnnnnnnnnnnnnnnnnnnnnnnnnnnnnnnnnnnnnnnnnnnnnnnnnnnnnnnnnnnnnnnnnnnnnnnnnnnnnnnnnnnnnnnnnnnnnnnnnnnnnnnnnnnnnnnnnnnnnnnnnnnnnnnnnnnnnnnnnnnnnnnnnnnnnnnnnnnnnnnnnnnnnnnnnnnnnnnnnnnnnnnnnnnnnnnnnnnnnnnnnnnnnnnnnnnnnnnnnnnnnnnnnnnnnnnnnnnnnnnnnnnnnnnnnnnnnnnnnnnnnnnnnnnnnnnnnnnnnnnnnnnnnnnnnnnnnnnnnnnnnnnnnnnnnnnnnnnnnnnnnnnnnnnnnnnnnnnnnnnnnnnnnnnnnnnnnnnnnnnnnnnnnnnnnnnnnnnnnnnnnnnnnnnnnnnnnnnnnnnnnnnnnnnnnnnnnnnnnnnnnnnnnnnnnnnnnnnnnnnnnnnnnnnnnnnnnnnnnnnnnnnnnnnnnnnnnnnnnnnnnnnnnnnnnnnnnnnnnnnnnnnnnnnnnnnnnnnnnnnnnnnnnnnnnnnnnnnnnnnnnnnnnnnnnnnnnnnnnnnnnnnnnnnnnnnnnnnnnnnnnnnnnnnnnnnnnnnnnnnnnnnnnnnnnnnnnnnnnnnnnnnnnnnnnnnnnnnnnnnnnnnnnnnnnnnnnnnnnnnnnnnnnnnnnnnnnnnnnnnnnnnnnnnnnnnnnnnnnnnnnnnnnnnnnnnnnnnnnnnnnnnnnnnnnnnnnnnnnnnnnnnnnnnnnnnnnnnnnnnnnnnnnnnnnnnnnnnnnnnnnnnnnnnnnnnnnnnnnnnnnnnnnnnnnnnnnnnnnnnnnnnnnnnnnnnnnnnnnnnnnnnnnnnnnnnnnnnnnnnnnnnnnnnnnnnnnnnnnnnnnnnnnnnnnnnnnnnnnnnnnnnnnnnnnnnnnnnnnnnnnnnnnnnnnnnnnnnnnnnnnnnnnnnnnnnnnnnnnnnnnnnnnnnnnnnnnnnnnnnnnnnnnnnnnnnnnnnnnnnnnnnnnnnnnnnnnnnnnnnnnnnnnnnnnnnnnnnnnnnnnnnnnnnnnnnnnnnnnnnnnnnnnnnnnnnnnnnnnnnnnnnnnnnnnnnnnnnnnnnnnnnnnnnnnnnnnnnnnnnnnnnnnnnnnnnnnnnnnnnnnnnnnnnnnnnnnnnnnnnnnnnnnnnnnnnnnnnnnnnnnnnnnnnnnnnnnnnnnnnnnnnnnnnnnnnnnnnnnnnnnnnnnnnnnnnnnnnnnnnnnnnnnnnnnnnnnnnnnnnnnnnnnnnnnnnnnnnnnnnnnnnnnnnnnnnnnnnnnnnnnnnnnnnnnnnnnnnnnnnnnnnnnnnnnnnnnnnnnnnnnnnnnnnnnnnnnnnnnnnnnnnnnnnnnnnnnnnnnnnnnnnnnnnnnnnnnnnnnnnnnnnnnnnnnnnnnnnnnnnnnnnnnnnnnnnnnnnnnnnnnnnnnnnnnnnnnnnnnnnnnnnnnnnnnnnnnnnnnnnnnnnnnnnnnnnnnnnnnnnnnnnnnnnnnnnnnnnnnnnnnnnnnnnnnnnnnnnnnnnnnnnnnnnnnnnnnnnnnnnnnnnnnnnnnnnnnnnnnnnnnnnnnnnnnnnnnnnnnnnnnnnnnnnnnnnnnnnnnnnnnnnnnnnnnnnnnnnnnnnnnnnnnnnnnnnnnnnnnnnnnnnnnnnnnnnnnnnnnnnnnnnnnnnnnnnnnnnnnnnnnnnnnnnnnnnnnnnnnnnnnnnnnnnnnnnnnnnnnnnnnnnnnnnnnnnnnnnnnnnnnnnnnnnnnnnnnnnnnnnnnnnnnnnnnnnnnnnnnnnnnnnnnnnnnnnnnnnnnnnnnnnnnnnnnnnnnnnnnnnnnnnnnnnnnnnnnnnnnnnnnnnnnnnnnnnnnnnnnnnnnnnnnnnnnnnnnnnnnnnnnnnnnnnnnnnnnnnnnnnnnnnnnnnnnnnnnnnnnnnnnnnnnnnnnnnnnnnnnnnnnnnnnnnnnnnnnnnnnnnnnnnnnnnnnnnnnnnnnnnnnnnnnnnnnnnnnnnnnnnnnnnnnnnnnnnnnnnnnnnnnnnnnnnnnnnnnnnnnnnnnnnnnnnnnnnnnnnnnnnnnnnnnnnnnnnnnnnnnnnnnnnnnnnnnnnnnnnnnnnnnnnnnnnnnnnnnnnnnnnnnnnnnnnnnnnnnnnnnnnnnnnnnnnnnnnnnnnnnnnnnnnnnnnnnnnnnnnnnnnnnnnnnnnnnnnnnnnnnnnnnnnnnnnnnnnnnnnnnnnnnnnnnnnnnnnnnnnnnnnnnnnnnnnnnnnnnnnnnnnnnnnnnnnnnnnnnnnnnnnnnnnnnnnnnnnnnnnnnnnnnnnnnnnnnnnnnnnnnnnnnnnnnnnnnnnnnnnnnnnnnnnnnnnnnnnnnnnnnnnnnnnnnnnnnnnnnnnnnnnnnnnnnnnnnnnnnnnnnnnnnnnnnnnnnnnnnnnnnnnnnnnnnnnnnnnnnnnnnnnnnnnnnnnnnnnnnnnnnnnnnnnnnnnnnnnnnnnnnnnnnnnnnnnnnnnnnnnnnnnnnnnnnnnnnnnnnnnnnnnnnnnnnnnnnnnnnnnnnnnnnnnnnnnnnnnnnnnnnnnnnnnnnnnnnnnnnnnnnnnnnnnnnnnnnnnnnnnnnnnnnnnnnnnnnnnnnnnnnnnnnnnnnnnnnnnnnnnnnnnnnnnnnnnnnnnnnnnnnnnnnnnnnnnnnnnnnnnnnnnnnnnnnnnnnnnnnnnnnnnnnnnnnnnnnnnnnnnnnnnnnnnnnnnnnnnnnnnnnnnnnnnnnnnnnnnnnnnnnnnnnnnnnnnnnnnnnnnnnnnnnnnnnnnnnnnnnnnnnnnnnnnnnnnnnnnnnnnnnnnnnnnnnnnnnnnnnnnnnnnnnnnnnnnnnnnnnnnnnnnnnnnnnnnnnnnnnnnnnnnnnnnnnnnnnnnnnnnnnnnnnnnnnnnnnnnnnnnnnnnnnnnnnnnnnnnnnnnnnnnnnnnnnnnnnnnnnnnnnnnnnnnnnnnnnnnnnnnnnnnnnnnnnnnnnnnnnnnnnnnnnnnnnnnnnnnnnnnnnnnnnnnnnnnnnnnnnnnnnnnnnnnnnnnnnnnnnnnnnnnnnnnnnnnnnnnnnnnnnnnnnnnnnnnnnnnnnnnnnnnnnnnnnnnnnnnnnnnnnnnnnnnnnnnnnnnnnnnnnnnnnnnnnnnnnnnnnnnnnnnnnnnnnnnnnnnnnnnnnnnnnnnnnnnnnnnnnnnnnnnnnnnnnnnnnnnnnnnnnnnnnnnnnnnnnnnnnnnnnnnnnnnnnnnnnnnnnnnnnnnnnnnnnnnnnnnnnnnnnnnnnnnnnnnnnnnnnnnnnnnnnnnnnnnnnnnnnnnnnnnnnnnnnnnnnnnnnnnnnnnnnnnnnnnnnnnnnnnnnnnnnnnnnnnnnnnnnnnnnnnnnnnnnnnnnnnnnnnnnnnnnnnnnnnnnnnnnnnnnnnnnnnnnnnnnnnnnnnnnnnnnnnnnnnnnnnnnnnnnnnnnnnnnnnnnnnnnnnnnnnnnnnnnnnnnnnnnnnnnnnnnnnnnnnnnnnnnnnnnnnnnnnnnnnnnnnnnnnnnnnnnnnnnnnnnnnnnnnnnnnnnnnnnnnnnnnnnnnnnnnnnnnnnnnnnnnnnnnnnnnnnnnnnnnnnnnnnnnnnnnnnnnnnnnnnnnnnnnnnnnnnnnnnnnnnnnnnnnnnnnnnnnnnnnnnnnnnnnnnnnnnnnnnnnnnnnnnnnnnnnnnnnnnnnnnnnnnnnnnnnnnnnnnnnnnnnnnnnnnnnnnnnnnnnnnnnnnnnnnnnnnnnnnnnnnnnnnnnnnnnnnnnnnnnnnnnnnnnnnnnnnnnnnnnnnnnnnnnnnnnnnnnnnnnnnnnnnnnnnnnnnnnnnnnnnnnnnnnnnnnnnnnnnnnnnnnnnnnnnnnnnnnnnnnnnnnnnnnnnnnnnnnnnnnnnnnnnnnnnnnnnnnnnnnnnnnnnnnnnnnnnnnnnnnnnnnnnnnnnnnnnnnnnnnnnnnnnnnnnnnnnnnnnnnnnnnnnnnnnnnnnnnnnnnnnnnnnnnnnnnnnnnnnnnnnnnnnnnnnnnnnnnnnnnnnnnnnnnnnnnnnnnnnnnnnnnnnnnnnnnnnnnnnnnnnnnnnnnnnnnnnnnnnnnnnnnnnnnnnnnnnnnnnnnnnnnnnnnnnnnnnnnnnnnnnnnnnnnnnnnnnnnnnnnnnnnnnnnnnnnnnnnnnnnnnnnnnnnnnnnnnnnnnnnnnnnnnnnnnnnnnnnnnnnnnnnnnnnnnnnnnnnnnnnnnnnnnnnnnnnnnnnnnnnnnnnnnnnnnnnnnnnnnnnnnnnnnnnnnnnnnnnnnnnnnnnnnnnnnnnnnnnnnnnnnnnnnnnnnnnnnnnnnnnnnnnnnnnnnnnnnnnnnnnnnnnnnnnnnnnnnnnnnnnnnnnnnnnnnnnnnnnnnnnnnnnnnnnnnnnnnnnnnnnnnnnnnnnnnnnnnnnnnnnnnnnnnnnnnnnnnnnnnnnnnnnnnnnnnnnnnnnnnnnnnnnnnnnnnnnnnnnnnnnnnnnnnnnnnnnnnnnnnnnnnnnnnnnnnnnnnnnnnnnnnnnnnnnnnnnnnnnnnnnnnnnnnnnnnnnnnnnnnnnnnnnnnnnnnnnnnnnnnnnnnnnnnnnnnnnnnnnnnnnnnnnnnnnnnnnnnnnnnnnnnnnnnnnnnnnnnnnnnnnnnnnnnnnnnnnnnnnnnnnnnnnnnnnnnnnnnnnnnnnnnnnnnnnnnnnnnnnnnnnnnnnnnnnnnnnnnnnnnnnnnnnnnnnnnnnnnnnnnnnnnnnnnnnnnnnnnnnnnnnnnnnnnnnnnnnnnnnnnnnnnnnnnnnnnnnnnnnnnnnnnnnnnnnnnnnnnnnnnnnnnnnnnnnnnnnnnnnnnnnnnnnnnnnnnnnnnnnnnnnnnnnnnnnnnnnnnnnnnnnnnnnnnnnnnnnnnnnnnnnnnnnnnnnnnnnnnnnnnnnnnnnnnnnnnnnnnnnnnnnnnnnnnnnnnnnnnnnnnnnnnnnnnnnnnnnnnnnnnnnnnnnnnnnnnnnnnnnnnnnnnnnnnnnnnnnnnnnnnnnnnnnnnnnnnnnnnnnnnnnnnnnnnnnnnnnnnnnnnnnnnnnnnnnnnnnnnnnnnnnnnnnnnnnnnnnnnnnnnnnnnnnnnnnnnnnnnnnnnnnnnnnnnnnnnnnnnnnnnnnnnnnnnnnnnnnnnnnnnnnnnnnnnnnnnnnnnnnnnnnnnnnnnnnnnnnnnnnnnnnnnnnnnnnnnnnnnnnnnnnnnnnnnnnnnnnnnnnnnnnnnnnnnnnnnnnnnnnnnnnnnnnnnnnnnnnnnnnnnnnnnnnnnnnnnnnnnnnnnnnnnnnnnnnnnnnnnnnnnnnnnnnnnnnnnnnnnnnnnnnnnnnnnnnnnnnnnnnnnnnnnnnnnnnnnnnnnnnnnnnnnnnnnnnnnnnnnnnnnnnnnnnnnnnnnnnnnnnnnnnnnnnnnnnnnnnnnnnnnnnnnnnnnnnnnnnnnnnnnnnnnnnnnnnnnnnnnnnnnnnnnnnnnnnnnnnnnnnnnnnnnnnnnnnnnnnnnnnnnnnnnnnnnnnnnnnnnnnnnnnnnnnnnnnnnnnnnnnnnnnnnnnnnnnnnnnnnnnnnnnnnnnnnnnnnnnnnnnnnnnnnnnnnnnnnnnnnnnnnnnnnnnnnnnnnnnnnnnnnnnnnnnnnnnnnnnnnnnnnnnnnnnnnnnnnnnnnnnnnnnnnnnnnnnnnnnnnnnnnnnnnnnnnnnnnnnnnnnnnnnnnnnnnnnnnnnnnnnnnnnnnnnnnnnnnnnnnnnnnnnnnnnnnnnnnnnnnnnnnnnnnnnnnnnnnnnnnnnnnnnnnnnnnnnnnnnnnnnnnnnnnnnnnnnnnnnnnnnnnnnnnnnnnnnnnnnnnnnnnnnnnnnnnnnnnnnnnnnnnnnnnnnnnnnnnnnnnnnnnnnnnnnnnnnnnnnnnnnnnnnnnnnnnnnnnnnnnnnnnnnnnnnnnnnnnnnnnnnnnnnnnnnnnnnnnnnnnnnnnnnnnnnnnnnnnnnnnnnnnnnnnnnnnnnnnnnnnnnnnnnnnnnnnnnnnnnnnnnnnnnnnnnnnnnnnnnnnnnnnnnnnnnnnnnnnnnnnnnnnnnnnnnnnnnnnnnnnnnnnnnnnnnnnnnnnnnnnnnnnnnnnnnnnnnnnnnnnnnnnnnnnnnnnnnnnnnnnnnnnnnnnnnnnnnnnnnnnnnnnnnnnnnnnnnnnnnnnnnnnnnnnnnnnnnnnnnnnnnnnnnnnnnnnnnnnnnnnnnnnnnnnnnnnnnnnnnnnnnnnnnnnnnnnnnnnnnnnnnnnnnnnnnnnnnnnnnnnnnnnnnnnnnnnnnnnnnnnnnnnnnnnnnnnnnnnnnnnnnnnnnnnnnnnnnnnnnnnnnnnnnnnnnnnnnnnnnnnnnnnnnnnnnnnnnnnnnnnnnnnnnnnnnnnnnnnnnnnnnnnnnnnnnnnnnnnnnnnnnnnnnnnnnnnnnnnnnnnnnnnnnnnnnnnnnnnnnnnnnnnnnnnnnnnnnnnnnnnnnnnnnnnnnnnnnnnnnnnnnnnnnnnnnnnnnnnnnnnnnnnnnnnnnnnnnnnnnnnnnnnnnnnnnnnnnnnnnnnnnnnnnnnnnnnnnnnnnnnnnnnnnnnnnnnnnnnnnnnnnnnnnnnnnnnnnnnnnnnnnnnnnnnnnnnnnnnnnnnnnnnnnnnnnnnnnnnnnnnnnnnnnnnnnnnnnnnnnnnnnnnnnnnnnnnnnnnnnnnnnnnnnnnnnnnnnnnnnnnnnnnnnnnnnnnnnnnnnnnnnnnnnnnnnnnnnnnnnnnnnnnnnnnnnnnnnnnnnnnnnnnnnnnnnnnnnnnnnnnnnnnnnnnnnnnnnnnnnnnnnnnnnnnnnnnnnnnnnnnnnnnnnnnnnnnnnnnnnnnnnnnnnnnnnnnnnnnnnnnnnnnnnnnnnnnnnnnnnnnnnnnnnnnnnnnnnnnnnnnnnnnnnnnnnnnnnnnnnnnnnnnnnnnnnnnnnnnnnnnnnnnnnnnnnnnnnnnnnnnnnnnnnnnnnnnnnnnnnnnnnnnnnnnnnnnnnnnnnnnnnnnnnnnnnnnnnnnnnnnnnnnnnnnnnnnnnnnnnnnnnnnnnnnnnnnnnnnnnnnnnnnnnnnnnnnnnnnnnnnnnnnnnnnnnnnnnnnnnnnnnnnnnnnnnnnnnnnnnnnnnnnnnnnnnnnnnnnnnnnnnnnnnnnnnnnnnnnnnnnnnnnnnnnnnnnnnnnnnnnnnnnnnnnnnnnnnnnnnnnnnnnnnnnnnnnnnnnnnnnnnnnnnnnnnnnnnnnnnnnnnnnnnnnnnnnnnnnnnnnnnnnnnnnnnnnnnnnnnnnnnnnnnnnnnnnnnnnnnnnnnnnnnnnnnnnnnnnnnnnnnnnnnnnnnnnnnnnnnnnnnnnnnnnnnnnnnnnnnnnnnnnnnnnnnnnnnnnnnnnnnnnnnnnnnnnnnnnnnnnnnnnnnnnnnnnnnnnnnnnnnnnnnnnnnnnnnnnnnnnnnnnnnnnnnnnnnnnnnnnnnnnnnnnnnnnnnnnnnnnnnnnnnnnnnnnnnnnnnnnnnnnnnnnnnnnnnnnnnnnnnnnnnnnnnnnnnnnnnnnnnnnnnnnnnnnnnnnnnnnnnnnnnnnnnnnnnnnnnnnnnnnnnnnnnnnnnnnnnnnnnnnnnnnnnnnnnnnnnnnnnnnnnnnnnnnnnnnnnnnnnnnnnnnnnnnnnnnnnnnnnnnnnnnnnnnnnnnnnnnnnnnnnnnnnnnnnnnnnnnnnnnnnnnnnnnnnnnnnnnnnnnnnnnnnnnnnnnnnnnnnnnnnnnnnnnnnnnnnnnnnnnnnnnnnnnnnnnnnnnnnnnnnnnnnnnnnnnnnnnnnnnnnnnnnnnnnnnnnnnnnnnnnnnnnnnnnnnnnnnnnnnnnnnnnnnnnnnnnnnnnnnnnnnnnnnnnnnnnnnnnnnnnnnnnnnnnnnnnnnnnnnnnnnnnnnnnnnnnnnnnnnnnnnnnnnnnnnnnnnnnnnnnnnnnnnnnnnnnnnnnnnnnnnnnnnnnnnnnnnnnnnnnnnnnnnnnnnnnnnnnnnnnnnnnnnnnnnnnnnnnnnnnnnnnnnnnnnnnnnnnnnnnnnnnnnnnnnnnnnnnnnnnnnnnnnnnnnnnnnnnnnnnnnnnnnnnnnnnnnnnnnnnnnnnnnnnnnnnnnnnnnnnnnnnnnnnnnnnnnnnnnnnnnnnnnnnnnnnnnnnnnnnnnnnnnnnnnnnnnnnnnnnnnnnnnnnnnnnnnnnnnnnnnnnnnnnnnnnnnnnnnnnnnnnnnnnnnnnnnnnnnnnnnnnnnnnnnnnnnnnnnnnnnnnnnnnnnnnnnnnnnnnnnnnnnnnnnnnnnnnnnnnnnnnnnnnnnnnnnnnnnnnnnnnnnnnnnnnnnnnnnnnnnnnnnnnnnnnnnnnnnnnnnnnnnnnnnnnnnnnnnnnnnnnnnnnnnnnnnnnnnnnnnnnnnnnnnnnnnnnnnnnnnnnnnnnnnnnnnnnnnnnnnnnnnnnnnnnnnnnnnnnnnnnnnnnnnnnnnnnnnnnnnnnnnnnnnnnnnnnnnnnnnnnnnnnnnnnnnnnnnnnnnnnnnnnnnnnnnnnnnnnnnnnnnnnnnnnnnnnnnnnnnnnnnnnnnnnnnnnnnnnnnnnnnnnnnnnnnnnnnnnnnnnnnnnnnnnnnnnnnnnnnnnnnnnnnnnnnnnnnnnnnnnnnnnnnnnnnnnnnnnnnnnnnnnnnnnnnnnnnnnnnnnnnnnnnnnnnnnnnnnnnnnnnnnnnnnnnnnnnnnnnnnnnnnnnnnnnnnnnnnnnnnnnnnnnnnnnnnnnnnnnnnnnnnnnnnnnnnnnnnnnnnnnnnnnnnnnnnnnnnnnnnnnnnnnnnnnnnnnnnnnnnnnnnnnnnnnnnnnnnnnnnnnnnnnnnnnnnnnnnnnnnnnnnnnnnnnnnnnnnnnnnnnnnnnnnnnnnnnnnnnnnnnnnnnnnnnnnnnnnnnnnnnnnnnnnnnnnnnnnnnnnnnnnnnnnnnnnnnnnnnnnnnnnnnnnnnnnnnnnnnnnnnnnnnnnnnnnnnnnnnnnnnnnnnnnnnnnnnnnnnnnnnnnnnnnnnnnnnnnnnnnnnnnnnnnnnnnnnnnnnnnnnnnnnnnnnnnnnnnnnnnnnnnnnnnnnnnnnnnnnnnnnnnnnnnnnnnnnnnnnnnnnnnnnnnnnnnnnnnnnnnnnnnnnnnnnnnnnnnnnnnnnnnnnnnnnnnnnnnnnnnnnnnnnnnnnnnnnnnnnnnnnnnnnnnnnnnnnnnnnnnnnnnnnnnnnnnnnnnnnnnnnnnnnnnnnnnnnnnnnnnnnnnnnnnnnnnnnnnnnnnnnnnnnnnnnnnnnnnnnnnnnnnnnnnnnnnnnnnnnnnnnnnnnnnnnnnnnnnnnnnnnnnnnnnnnnnnnnnnnnnnnnnnnnnnnnnnnnnnnnnnnnnnnnnnnnnnnnnnnnnnnnnnnnnnnnnnnnnnnnnnnnnnnnnnnnnnnnnnnnnnnnnnnnnnnnnnnnnnnnnnnnnnnnnnnnnnnnnnnnnnnnnnnnnnnnnnnnnnnnnnnnnnnnnnnnnnnnnnnnnnnnnnnnnnnnnnnnnnnnnnnnnnnnnnnnnnnnnnnnnnnnnnnnnnnnnnnnnnnnnnnnnnnnnnnnnnnnnnnnnnnnnnnnnnnnnnnnnnnnnnnnnnnnnnnnnnnnnnnnnnnnnnnnnnnnnnnnnnnnnnnnnnnnnnnnnnnnnnnnnnnnnnnnnnnnnnnnnnnnnnnnnnnnnnnnnnnnnnnnnnnnnnnnnnnnnnnnnnnnnnnnnnnnnnnnnnnnnnnnnnnnnnnnnnnnnnnnnnnnnnnnnnnnnnnnnnnnnnnnnnnnnnnnnnnnnnnnnnnnnnnnnnnnnnnnnnnnnnnnnnnnnnnnnnnnnnnnnnnnnnnnnnnnnnnnnnnnnnnnnnnnnnnnnnnnnnnnnnnnnnnnnnnnnnnnnnnnnnnnnnnnnnnnnnnnnnnnnnnnnnnnnnnnnnnnnnnnnnnnnnnnnnnnnnnnnnnnnnnnnnnnnnnnnnnnnnnnnnnnnnnnnnnnnnnnnnnnnnnnnnnnnnnnnnnnnnnnnnnnnnnnnnnnnnnnnnnnnnnnnnnnnnnnnnnnnnnnnnnnnnnnnnnnnnnnnnnnnnnnnnnnnnnnnnnnnnnnnnnnnnnnnnnnnnnnnnnnnnnnnnnnnnnnnnnnnnnnnnnnnnnnnnnnnnnnnnnnnnnnnnnnnnnnnnnnnnnnnnnnnnnnnnnnnnnnnnnnnnnnnnnnnnnnnnnnnnnnnnnnnnnnnnnnnnnnnnnnnnnnnnnnnnnnnnnnnnnnnnnnnnnnnnnnnnnnnnnnnnnnnnnnnnnnnnnnnnnnnnnnnnnnnnnnnnnnnnnnnnnnnnnnnnnnnnnnnnnnnnnnnnnnnnnnnnnnnnnnnnnnnnnnnnnnnnnnnnnnnnnnnnnnnnnnnnnnnnnnnnnnnnnnnnnnnnnnnnnnnnnnnnnnnnnnnnnnnnnnnnnnnnnnnnnnnnnnnnnnnnnnnnnnnnnnnnnnnnnnnnnnnnnnnnnnnnnnnnnnnnnnnnnnnnnnnnnnnnnnnnnnnnnnnnnnnnnnnnnnnnnnnnnnnnnnnnnnnnnnnnnnnnnnnnnnnnnnnnnnnnnnnnnnnnnnnnnnnnnnnnnnnnnnnnnnnnnnnnnnnnnnnnnnnnnnnnnnnnnnnnnnnnnnnnnnnnnnnnnnnnnnnnnnnnnnnnnnnnnnnnnnnnnnnnnnnnnnnnnnnnnnnnnnnnnnnnnnnnnnnnnnnnnnnnnnnnnnnnnnnnnnnnnnnnnnnnnnnnnnnnnnnnnnnnnnnnnnnnnnnnnnnnnnnnnnnnnnnnnnnnnnnnnnnnnnnnnnnnnnnnnnnnnnnnnnnnnnnnnnnnnnnnnnnnnnnnnnnnnnnnnnnnnnnnnnnnnnnnnnnnnnnnnnnnnnnnnnnnnnnnnnnnnnnnnnnnnnnnnnnnnnnnnnnnnnnnnnnnnnnnnnnnnnnnnnnnnnnnnnnnnnnnnnnnnnnnnnnnnnnnnnnnnnnnnnnnnnnnnnnnnnnnnnnnnnnnnnnnnnnnnnnnnnnnnnnnnnnnnnnnnnnnnnnnnnnnnnnnnnnnnnnnnnnnnnnnnnnnnnnnnnnnnnnnnnnnnnnnnnnnnnnnnnnnnnnnnnnnnnnnnnnnnnnnnnnnnnnnnnnnnnnnnnnnnnnnnnnnnnnnnnnnnnnnnnnnnnnnnnnnnnnnnnnnnnnnnnnnnnnnnnnnnnnnnnnnnnnnnnnnnnnnnnnnnnnnnnnnnnnnnnnnnnnnnnnnnnnnnnnnnnnnnnnnnnnnnnnnnnnnnnnnnnnnnnnnnnnnnnnnnnnnnnnnnnnnnnnnnnnnnnnnnnnnnnnnnnnnnnnnnnnnnnnnnnnnnnnnnnnnnnnnnnnnnnnnnnnnnnnnnnnnnnnnnnnnnnnnnnnnnnnnnnnnnnnnnnnnnnnnnnnnnnnnnnnnnnnnnnnnnnnnnnnnnnnnnnnnnnnnnnnnnnnnnnnnnnnnnnnnnnnnnnnnnnnnnnnnnnnnnnnnnnnnnnnnnnnnnnnnnnnnnnnnnnnnnnnnnnnnnnnnnnnnnnnnnnnnnnnnnnnnnnnnnnnnnnnnnnnnnnnnnnnnnnnnnnnnnnnnnnnnnnnnnnnnnnnnnnnnnnnnnnnnnnnnnnnnnnnnnnnnnnnnnnnnnnnnnnnnnnnnnnnnnnnnnnnnnnnnnnnnnnnnnnnnnnnnnnnnnnnnnnnnnnnnnnnnnnnnnnnnnnnnnnnnnnnnnnnnnnnnnnnnnnnnnnnnnnnnnnnnnnnnnnnnnnnnnnnnnnnnnnnnnnnnnnnnnnnnnnnnnnnnnnnnnnnnnnnnnnnnnnnnnnnnnnnnnnnnnnnnnnnnnnnnnnnnnnnnnnnnnnnnnnnnnnnnnnnnnnnnnnnnnnnnnnnnnnnnnnnnnnnnnnnnnnnnnnnnnnnnnnnnnnnnnnnnnnnnnnnnnnnnnnnnnnnnnnnnnnnnnnnnnnnnnnnnnnnnnnnnnnnnnnnnnnnnnnnnnnnnnnnnnnnnnnnnnnnnnnnnnnnnnnnnnnnnnnnnnnnnnnnnnnnnnnnnnnnnnnnnnnnnnnnnnnnnnnnnnnnnnnnnnnnnnnnnnnnnnnnnnnnnnnnnnnnnnnnnnnnnnnnnnnnnnnnnnnnnnnnnnnnnnnnnnnnnnnnnnnnnnnnnnnnnnnnnnnnnnnnnnnnnnnnnnnnnnnnnnnnnnnnnnnnnnnnnnnnnnnnnnnnnnnnnnnnnnnnnnnnnnnnnnnnnnnnnnnnnnnnnnnnnnnnnnnnnnnnnnnnnnnnnnnnnnnnnnnnnnnnnnnnnnnnnnnnnnnnnnnnnnnnnnnnnnnnnnnnnnnnnnnnnnnnnnnnnnnnnnnnnnnnnnnnnnnnnnnnnnnnnnnnnnnnnnnnnnnnnnnnnnnnnnnnnnnnnnnnnnnnnnnnnnnnnnnnnnnnnnnnnnnnnnnnnnnnnnnnnnnnnnnnnnnnnnnnnnnnnnnnnnnnnnnnnnnnnnnnnnnnnnnnnnnnnnnnnnnnnnnnnnnnnnnnnnnnnnnnnnnnnnnnnnnnnnnnnnnnnnnnnnnnnnnnnnnnnnnnnnnnnnnnnnnnnnnnnnnnnnnnnnnnnnnnnnnnnnnnnnnnnnnnnnnnnnnnnnnnnnnnnnnnnnnnnnnnnnnnnnnnnnnnnnnnnnnnnnnnnnnnnnnnnnnnnnnnnnnnnnnnnnnnnnnnnnnnnnnnnnnnnnnnnnnnnnnnnnnnnnnnnnnnnnnnnnnnnnnnnnnnnnnnnnnnnnnnnnnnnnnnnnnnnnnnnnnnnnnnnnnnnnnnnnnnnnnnnnnnnnnnnnnnnnnnnnnnnnnnnnnnnnnnnnnnnnnnnnnnnnnnnnnnnnnnnnnnnnnnnnnnnnnnnnnnnnnnnnnnnnnnnnnnnnnnnnnnnnnnnnnnnnnnnnnnnnnnnnnnnnnnnnnnnnnnnnnnnnnnnnnnnnnnnnnnnnnnnnnnnnnnnnnnnnnnnnnnnnnnnnnnnnnnnnnnnnnnnnnnnnnnnnnnnnnnnnnnnnnnnnnnnnnnnnnnnnnnnnnnnnnnnnnnnnnnnnnnnnnnnnnnnnnnnnnnnnnnnnnnnnnnnnnnnnnnnnnnnnnnnnnnnnnnnnnnnnnnnnnnnnnnnnnnnnnnnnnnnnnnnnnnnnnnnnnnnnnnnnnnnnnnnnnnnnnnnnnnnnnnnnnnnnnnnnnnnnnnnnnnnnnnnnnnnnnnnnnnnnnnnnnnnnnnnnnnnnnnnnnnnnnnnnnnnnnnnnnnnnnnnnnnnnnnnnnnnnnnnnnnnnnnnnnnnnnnnnnnnnnnnnnnnnnnnnnnnnnnnnnnnnnnnnnnnnnnnnnnnnnnnnnnnnnnnnnnnnnnnnnnnnnnnnnnnnnnnnnnnnnnnnnnnnnnnnnnnnnnnnnnnnnnnnnnnnnnnnnnnnnnnnnnnnnnnnnnnnnnnnnnnnnnnnnnnnnnnnnnnnnnnnnnnnnnnnnnnnnnnnnnnnnnnnnnnnnnnnnnnnnnnnnnnnnnnnnnnnnnnnnnnnnnnnnnnnnnnnnnnnnnnnnnnnnnnnnnnnnnnnnnnnnnnnnnnnnnnnnnnnnnnnnnnnnnnnnnnnnnnnnnnnnnnnnnnnnnnnnnnnnnnnnnnnnnnnnnnnnnnnnnnnnnnnnnnnnnnnnnnnnnnnnnnnnnnnnnnnnnnnnnnnnnnnnnnnnnnnnnnnnnnnnnnnnnnnnnnnnnnnnnnnnnnnnnnnnnnnnnnnnnnnnnnnnnnnnnnnnnnnnnnnnnnnnnnnnnnnnnnnnnnnnnnnnnnnnnnnnnnnnnnnnnnnnnnnnnnnnnnnnnnnnnnnnnnnnnnnnnnnnnnnnnnnnnnnnnnnnnnnnnnnnnnnnnnnnnnnnnnnnnnnnnnnnnnnnnnnnnnnnnnnnnnnnnnnnnnnnnnnnnnnnnnnnnnnnnnnnnnnnnnnnnnnnnnnnnnnnnnnnnnnnnnnnnnnnnnnnnnnnnnnnnnnnnnnnnnnnnnnnnnnnnnnnnnnnnnnnnnnnnnnnnnnnnnnnnnnnnnnnnnnnnnnnnnnnnnnnnnnnnnnnnnnnnnnnnnnnnnnnnnnnnnnnnnnnnnnnnnnnnnnnnnnnnnnnnnnnnnnnnnnnnnnnnnnnnnnnnnnnnnnnnnnnnnnnnnnnnnnnnnnnnnnnnnnnnnnnnnnnnnnnnnnnnnnnnnnnnnnnnnnnnnnnnnnnnnnnnnnnnnnnnnnnnnnnnnnnnnnnnnnnnnnnnnnnnnnnnnnnnnnnnnnnnnnnnnnnnnnnnnnnnnnnnnnnnnnnnnnnnnnnnnnnnnnnnnnnnnnnnnnnnnnnnnnnnnnnnnnnnnnnnnnnnnnnnnnnnnnnnnnnnnnnnnnnnnnnnnnnnnnnnnnnnnnnnnnnnnnnnnnnnnnnnnnnnnnnnnnnnnnnnnnnnnnnnnnnnnnnnnnnnnnnnnnnnnnnnnnnnnnnnnnnnnnnnnnnnnnnnnnnnnnnnnnnnnnnnnnnnnnnnnnnnnnnnnnnnnnnnnnnnnnnnnnnnnnnnnnnnnnnnnnnnnnnnnnnnnnnnnnnnnnnnnnnnnnnnnnnnnnnnnnnnnnnnnnnnnnnnnnnnnnnnnnnnnnnnnnnnnnnnnnnnnnnnnnnnnnnnnnnnnnnnnnnnnnnnnnnnnnnnnnnnnnnnnnnnnnnnnnnnnnnnnnnnnnnnnnnnnnnnnnnnnnnnnnnnnnnnnnnnnnnnnnnnnnnnnnnnnnnnnnnnnnnnnnnnnnnnnnnnnnnnnnnnnnnnnnnnnnnnnnnnnnnnnnnnnnnnnnnnnnnnnnnnnnnnnnnnnnnnnnnnnnnnnnnnnnnnnnnnnnnnnnnnnnnnnnnnnnnnnnnnnnnnnnnnnnnnnnnnnnnnnnnnnnnnnnnnnnnnnnnnnnnnnnnnnnnnnnnnnnnnnnnnnnnnnnnnnnnnnnnnnnnnnnnnnnnnnnnnnnnnnnnnnnnnnnnnnnnnnnnnnnnnnnnnnnnnnnnnnnnnnnnnnnnnnnnnnnnnnnnnnnnnnnnnnnnnnnnnnnnnnnnnnnnnnnnnnnnnnnnnnnnnnnnnnnnnnnnnnnnnnnnnnnnnnnnnnnnnnnnnnnnnnnnnnnnnnnnnnnnnnnnnnnnnnnnnnnnnnnnnnnnnnnnnnnnnnnnnnnnnnnnnnnnnnnnnnnnnnnnnnnnnnnnnnnnnnnnnnnnnnnnnnnnnnnnnnnnnnnnnnnnnnnnnnnnnnnnnnnnnnnnnnnnnnnnnnnnnnnnnnnnnnnnnnnnnnnnnnnnnnnnnnnnnnnnnnnnnnnnnnnnnnnnnnnnnnnnnnnnnnnnnnnnnnnnnnnnnnnnnnnnnnnnnnnnnnnnnnnnnnnnnnnnnnnnnnnnnnnnnnnnnnnnnnnnnnnnnnnnnnnnnnnnnnnnnnnnnnnnnnnnnnnnnnnnnnnnnnnnnnnnnnnnnnnnnnnnnnnnnnnnnnnnnnnnnnnnnnnnnnnnnnnnnnnnnnnnnnnnnnnnnnnnnnnnnnnnnnnnnnnnnnnnnnnnnnnnnnnnnnnnnnnnnnnnnnnnnnnnnnnnnnnnnnnnnnnnnnnnnnnnnnnnnnnnnnnnnnnnnnnnnnnnnnnnnnnnnnnnnnnnnnnnnnnnnnnnnnnnnnnnnnnnnnnnnnnnnnnnnnnnnnnnnnnnnnnnnnnnnnnnnnnnnnnnnnnnnnnnnnnnnnnnnnnnnnnnnnnnnnnnnnnnnnnnnnnnnnnnnnnnnnnnnnnnnnnnnnnnnnnnnnnnnnnnnnnnnnnnnnnnnnnnnnnnnnnnnnnnnnnnnnnnnnnnnnnnnnnnnnnnnnnnnnnnnnnnnnnnnnnnnnnnnnnnnnnnnnnnnnnnnnnnnnnnnnnnnnnnnnnnnnnnnnnnnnnnnnnnnnnnnnnnnnnnnnnnnnnnnnnnnnnnnnnnnnnnnnnnnnnnnnnnnnnnnnnnnnnnnnnnnnnnnnnnnnnnnnnnnnnnnnnnnnnnnnnnnnnnnnnnnnnnnnnnnnnnnnnnnnnnnnnnnnnnnnnnnnnnnnnnnnnnnnnnnnnnnnnnnnnnnnnnnnnnnnnnnnnnnnnnnnnnnnnnnnnnnnnnnnnnnnnnnnnnnnnnnnnnnnnnnnnnnnnnnnnnnnnnnnnnnnnnnnnnnnnnnnnnnnnnnnnnnnnnnnnnnnnnnnnnnnnnnnnnnnnnnnnnnnnnnnnnnnnnnnnnnnnnnnnnnnnnnnnnnnnnnnnnnnnnnnnnnnnnnnnnnnnnnnnnnnnnnnnnnnnnnnnnnnnnnnnnnnnnnnnnnnnnnnnnnnnnnnnnnnnnnnnnnnnnnnnnnnnnnnnnnnnnnnnnnnnnnnnnnnnnnnnnnnnnnnnnnnnnnnnnnnnnnnnnnnnnnnnnnnnnnnnnnnnnnnnnnnnnnnnnnnnnnnnnnnnnnnnnnnnnnnnnnnnnnnnnnnnnnnnnnnnnnnnnnnnnnnnnnnnnnnnnnnnnnnnnnnnnnnnnnnnnnnnnnnnnnnnnnnnnnnnnnnnnnnnnnnnnnnnnnnnnnnnnnnnnnnnnnnnnnnnnnnnnnnnnnnnnnnnnnnnnnnnnnnnnnnnnnnnnnnnnnnnnnnnnnnnnnnnnnnnnnnnnnnnnnnnnnnnnnnnnnnnnnnnnnnnnnnnnnnnnnnnnnnnnnnnnnnnnnnnnnnnnnnnnnnnnnnnnnnnnnnnnnnnnnnnnnnnnnnnnnnnnnnnnnnnnnnnnnnnnnnnnnnnnnnnnnnnnnnnnnnnnnnnnnnnnnnnnnnnnnnnnnnnnnnnnnnnnnnnnnnnnnnnnnnnnnnnnnnnnnnnnnnnnnnnnnnnnnnnnnnnnnnnnnnnnnnnnnnnnnnnnnnnnnnnnnnnnnnnnnnnnnnnnnnnnnnnnnnnnnnnnnnnnnnnnnnnnnnnnnnnnnnnnnnnnnnnnnnnnnnnnnnnnnnnnnnnnnnnnnnnnnnnnnnnnnnnnnnnnnnnnnnnnnnnnnnnnnnnnnnnnnnnnnnnnnnnnnnnnnnnnnnnnnnnnnnnnnnnnnnnnnnnnnnnnnnnnnnnnnnnnnnnnnnnnnnnnnnnnnnnnnnnnnnnnnnnnnnnnnnnnnnnnnnnnnnnnnnnnnnnnnnnnnnnnnnnnnnnnnnnnnnnnnnnnnnnnnnnnnnnnnnnnnnnnnnnnnnnnnnnnnnnnnnnnnnnnnnnnnnnnnnnnnnnnnnnnnnnnnnnnnnnnnnnnnnnnnnnnnnnnnnnnnnnnnnnnnnnnnnnnnnnnnnnnnnnnnnnnnnnnnnnnnnnnnnnnnnnnnnnnnnnnnnnnnnnnnnnnnnnnnnnnnnnnnnnnnnnnnnnnnnnnnnnnnnnnnnnnnnnnnnnnnnnnnnnnnnnnnnnnnnnnnnnnnnnnnnnnnnnnnnnnnnnnnnnnnnnnnnnnnnnnnnnnnnnnnnnnnnnnnnnnnnnnnnnnnnnnnnnnnnnnnnnnnnnnnnnnnnnnnnnnnnnnnnnnnnnnnnnnnnnnnnnnnnnnnnnnnnnnnnnnnnnnnnnnnnnnnnnnnnnnnnnnnnnnnnnnnnnnnnnnnnnnnnnnnnnnnnnnnnnnnnnnnnnnnnnnnnnnnnnnnnnnnnnnnnnnnnnnnnnnnnnnnnnnnnnnnnnnnnnnnnnnnnnnnnnnnnnnnnnnnnnnnnnnnnnnnnnnnnnnnnnnnnnnnnnnnnnnnnnnnnnnnnnnnnnnnnnnnnnnnnnnnnnnnnnnnnnnnnnnnnnnnnnnnnnnnnnnnnnnnnnnnnnnnnnnnnnnnnnnnnnnnnnnnnnnnnnnnnnnnnnnnnnnnnnnnnnnnnnnnnnnnnnnnnnnnnnnnnnnnnnnnnnnnnnnnnnnnnnnnnnnnnnnnnnnnnnnnnnnnnnnnnnnnnnnnnnnnnnnnnnnnnnnnnnnnnnnnnnnnnnnnnnnnnnnnnnnnnnnnnnnnnnnnnnnnnnnnnnnnnnnnnnnnnnnnnnnnnnnnnnnnnnnnnnnnnnnnnnnnnnnnnnnnnnnnnnnnnnnnnnnnnnnnnnnnnnnnnnnnnnnnnnnnnnnnnnnnnnnnnnnnnnnnnnnnnnnnnnnnnnnnnnnnnnnnnnnnnnnnnnnnnnnnnnnnnnnnnnnnnnnnnnnnnnnnnnnnnnnnnnnnnnnnnnnnnnnnnnnnnnnnnnnnnnnnnnnnnnnnnnnnnnnnnnnnnnnnnnnnnnnnnnnnnnnnnnnnnnnnnnnnnnnnnnnnnnnnnnnnnnnnnnnnnnnnnnnnnnnnnnnnnnnnnnnnnnnnnnnnnnnnnnnnnnnnnnnnnnnnnnnnnnnnnnnnnnnnnnnnnnnnnnnnnnnnnnnnnnnnnnnnnnnnnnnnnnnnnnnnnnnnnnnnnnnnnnnnnnnnnnnnnnnnnnnnnnnnnnnnnnnnnnnnnnnnnnnnnnnnnnnnnnnnnnnnnnnnnnnnnnnnnnnnnnnnnnnnnnnnnnnnnnnnnnnnnnnnnnnnnnnnnnnnnnnnnnnnnnnnnnnnnnnnnnnnnnnnnnnnnnnnnnnnnnnnnnnnnnnnnnnnnnnnnnnnnnnnnnnnnnnnnnnnnnnnnnnnnnnnnnnnnnnnnnnnnnnnnnnnnnnnnnnnnnnnnnnnnnnnnnnnnnnnnnnnnnnnnnnnnnnnnnnnnnnnnnnnnnnnnnnnnnnnnnnnnnnnnnnnnnnnnnnnnnnnnnnnnnnnnnnnnnnnnnnnnnnnnnnnnnnnnnnnnnnnnnnnnnnnnnnnnnnnnnnnnnnnnnnnnnnnnnnnnnnnnnnnnnnnnnnnnnnnnnnnnnnnnnnnnnnnnnnnnnnnnnnnnnnnnnnnnnnnnnnnnnnnnnnnnnnnnnnnnnnnnnnnnnnnnnnnnnnnnnnnnnnnnnnnnnnnnnnnnnnnnnnnnnnnnnnnnnnnnnnnnnnnnnnnnnnnnnnnnnnnnnnnnnnnnnnnnnnnnnnnnnnnnnnnnnnnnnnnnnnnnnnnnnnnnnnnnnnnnnnnnnnnnnnnnnnnnnnnnnnnnnnnnnnnnnnnnnnnnnnnnnnnnnnnnnnnnnnnnnnnnnnnnnnnnnnnnnnnnnnnnnnnnnnnnnnnnnnnnnnnnnnnnnnnnnnnnnnnnnnnnnnnnnnnnnnnnnnnnnnnnnnnnnnnnnnnnnnnnnnnnnnnnnnnnnnnnnnnnnnnnnnnnnnnnnnnnnnnnnnnnnnnnnnnnnnnnnnnnnnnnnnnnnnnnnnnnnnnnnnnnnnnnnnnnnnnnnnnnnnnnnnnnnnnnnnnnnnnnnnnnnnnnnnnnnnnnnnnnnnnnnnnnnnnnnnnnnnnnnnnnnnnnnnnnnnnnnnnnnnnnnnnnnnnnnnnnnnnnnnnnnnnnnnnnnnnnnnnnnnnnnnnnnnnnnnnnnnnnnnnnnnnnnnnnnnnnnnnnnnnnnnnnnnnnnnnnnnnnnnnnnnnnnnnnnnnnnnnnnnnnnnnnnnnnnnnnnnnnnnnnnnnnnnnnnnnnnnnnnnnnnnnnnnnnnnnnnnnnnnnnnnnnnnnnnnnnnnnnnnnnnnnnnnnnnnnnnnnnnnnnnnnnnnnnnnnnnnnnnnnnnnnnnnnnnnnnnnnnnnnnnnnnnnnnnnnnnnnnnnnnnnnnnnnnnnnnnnnnnnnnnnnnnnnnnnnnnnnnnnnnnnnnnnnnnnnnnnnnnnnnnnnnnnnnnnnnnnnnnnnnnnnnnnnnnnnnnnnnnnnnnnnnnnnnnnnnnnnnnnnnnnnnnnnnnnnnnnnnnnnnnnnnnnnnnnnnnnnnnnnnnnnnnnnnnnnnnnnnnnnnnnnnnnnnnnnnnnnnnnnnnnnnnnnnnnnnnnnnnnnnnnnnnnnnnnnnnnnnnnnnnnnnnnnnnnnnnnnnnnnnnnnnnnnnnnnnnnnnnnnnnnnnnnnnnnnnnnnnnnnnnnnnnnnnnnnnnnnnnnnnnnnnnnnnnnnnnnnnnnnnnnnnnnnnnnnnnnnnnnnnnnnnnnnnnnnnnnnnnnnnnnnnnnnnnnnnnnnnnnnnnnnnnnnnnnnnnnnnnnnnnnnnnnnnnnnnnnnnnnnnnnnnnnnnnnnnnnnnnnnnnnnnnnnnnnnnnnnnnnnnnnnnnnnnnnnnnnnnnnnnnnnnnnnnnnnnnnnnnnnnnnnnnnnnnnnnnnnnnnnnnnnnnnnnnnnnnnnnnnnnnnnnnnnnnnnnnnnnnnnnnnnnnnnnnnnnnnnnnnnnnnnnnnnnnnnnnnnnnnnnnnnnnnnnnnnnnnnnnnnnnnnnnnnnnnnnnnnnnnnnnnnnnnnnnnnnnnnnnnnnnnnnnnnnnnnnnnnnnnnnnnnnnnnnnnnnnnnnnnnnnnnnnnnnnnnnnnnnnnnnnnnnnnnnnnnnnnnnnnnnnnnnnnnnnnnnnnnnnnnnnnnnnnnnnnnnnnnnnnnnnnnnnnnnnnnnnnnnnnnnnnnnnnnnnnnnnnnnnnnnnnnnnnnnnnnnnnnnnnnnnnnnnnnnnnnnnnnnnnnnnnnnnnnnnnnnnnnnnnnnnnnnnnnnnnnnnnnnnnnnnnnnnnnnnnnnnnnnnnnnnnnnnnnnnnnnnnnnnnnnnnnnnnnnnnnnnnnnnnnnnnnnnnnnnnnnnnnnnnnnnnnnnnnnnnnnnnnnnnnnnnnnnnnnnnnnnnnnnnnnnnnnnnnnnnnnnnnnnnnnnnnnnnnnnnnnnnnnnnnnnnnnnnnnnnnnnnnnnnnnnnnnnnnnnnnnnnnnnnnnnnnnnnnnnnnnnnnnnnnnnnnnnnnnnnnnnnnnnnnnnnnnnnnnnnnnnnnnnnnnnnnnnnnnnnnnnnnnnnnnnnnnnnnnnnnnnnnnnnnnnnnnnnnnnnnnnnnnnnnnnnnnnnnnnnnnnnnnnnnnnnnnnnnnnnnnnnnnnnnnnnnnnnnnnnnnnnnnnnnnnnnnnnnnnnnnnnnnnnnnnnnnnnnnnnnnnnnnnnnnnnnnnnnnnnnnnnnnnnnnnnnnnnnnnnnnnnnnnnnnnnnnnnnnnnnnnnnnnnnnnnnnnnnnnnnnnnnnnnnnnnnnnnnnnnnnnnnnnnnnnnnnnnnnnnnnnnnnnnnnnnnnnnnnnnnnnnnnnnnnnnnnnnnnnnnnnnnnnnnnnnnnnnnnnnnnnnnnnnnnnnnnnnnnnnnnnnnnnnnnnnnnnnnnnnnnnnnnnnnnnnnnnnnnnnnnnnnnnnnnnnnnnnnnnnnnnnnnnnnnnnnnnnnnnnnnnnnnnnnnnnnnnnnnnnnnnnnnnnnnnnnnnnnnnnnnnnnnnnnnnnnnnnnnnnnnnnnnnnnnnnnnnnnnnnnnnnnnnnnnnnnnnnnnnnnnnnnnnnnnnnnnnnnnnnnnnnnnnnnnnnnnnnnnnnnnnnnnnnnnnnnnnnnnnnnnnnnnnnnnnnnnnnnnnnnnnnnnnnnnnnnnnnnnnnnnnnnnnnnnnnnnnnnnnnnnnnnnnnnnnnnnnnnnnnnnnnnnnnnnnnnnnnnnnnnnnnnnnnnnnnnnnnnnnnnnnnnnnnnnnnnnnnnnnnnnnnnnnnnnnnnnnnnnnnnnnnnnnnnnnnnnnnnnnnnnnnnnnnnnnnnnnnnnnnnnnnnnnnnnnnnnnnnnnnnnnnnnnnnnnnnnnnnnnnnnnnnnnnnnnnnnnnnnnnnnnnnnnnnnnnnnnnnnnnnnnnnnnnnnnnnnnnnnnnnnnnnnnnnnnnnnnnnnnnnnnnnnnnnnnnnnnnnnnnnnnnnnnnnnnnnnnnnnnnnnnnnnnnnnnnnnnnnnnnnnnnnnnnnnnnnnnnnnnnnnnnnnnnnnnnnnnnnnnnnnnnnnnnnnnnnnnnnnnnnnnnnnnnnnnnnnnnnnnnnnnnnnnnnnnnnnnnnnnnnnnnnnnnnnnnnnnnnnnnnnnnnnnnnnnnnnnnnnnnnnnnnnnnnnnnnnnnnnnnnnnnnnnnnnnnnnnnnnnnnnnnnnnnnnnnnnnnnnnnnnnnnnnnnnnnnnnnnnnnnnnnnnnnnnnnnnnnnnnnnnnnnnnnnnnnnnnnnnnnnnnnnnnnnnnnnnnnnnnnnnnnnnnnnnnnnnnnnnnnnnnnnnnnnnnnnnnnnnnnnnnnnnnnnnnnnnnnnnnnnnnnnnnnnnnnnnnnnnnnnnnnnnnnnnnnnnnnnnnnnnnnnnnnnnnnnnnnnnnnnnnnnnnnnnnnnnnnnnnnnnnnnnnnnnnnnnnnnnnnnnnnnnnnnnnnnnnnnnnnnnnnnnnnnnnnnnnnnnnnnnnnnnnnnnnnnnnnnnnnnnnnnnnnnnnnnnnnnnnnnnnnnnnnnnnnnnnnnnnnnnnnnnnnnnnnnnnnnnnnnnnnnnnnnnnnnnnnnnnnnnnnnnnnnnnnnnnnnnnnnnnnnnnnnnnnnnnnnnnnnnnnnnnnnnnnnnnnnnnnnnnnnnnnnnnnnnnnnnnnnnnnnnnnnnnnnnnnnnnnnnnnnnnnnnnnnnnnnnnnnnnnnnnnnnnnnnnnnnnnnnnnnnnnnnnnnnnnnnnnnnnnnnnnnnnnnnnnnnnnnnnnnnnnnnnnnnnnnnnnnnnnnnnnnnnnnnnnnnnnnnnnnnnnnnnnnnnnnnnnnnnnnnnnnnnnnnnnnnnnnnnnnnnnnnnnnnnnnnnnnnnnnnnnnnnnnnnnnnnnnnnnnnnnnnnnnnnnnnnnnnnnnnnnnnnnnnnnnnnnnnnnnnnnnnnnnnnnnnnnnnnnnnnnnnnnnnnnnnnnnnnnnnnnnnnnnnnnnnnnnnnnnnnnnnnnnnnnnnnnnnnnnnnnnnnnnnnnnnnnnnnnnnnnnnnnnnnnnnnnnnnnnnnnnnnnnnnnnnnnnnnnnnnnnnnnnnnnnnnnnnnnnnnnnnnnnnnnnnnnnnnnnnnnnnnnnnnnnnnnnnnnnnnnnnnnnnnnnnnnnnnnnnnnnnnnnnnnnnnnnnnnnnnnnnnnnnnnnnnnnnnnnnnnnnnnnnnnnnnnnnnnnnnnnnnnnnnnnnnnnnnnnnnnnnnnnnnnnnnnnnnnnnnnnnnnnnnnnnnnnnnnnnnnnnnnnnnnnnnnnnnnnnnnnnnnnnnnnnnnnnnnnnnnnnnnnnnnnnnnnnnnnnnnnnnnnnnnnnnnnnnnnnnnnnnnnnnnnnnnnnnnnnnnnnnnnnnnnnnnnnnnnnnnnnnnnnnnnnnnnnnnnnnnnnnnnnnnnnnnnnnnnnnnnnnnnnnnnnnnnnnnnnnnnnnnnnnnnnnnnnnnnnnnnnnnnnnnnnnnnnnnnnnnnnnnnnnnnnnnnnnnnnnnnnnnnnnnnnnnnnnnnnnnnnnnnnnnnnnnnnnnnnnnnnnnnnnnnnnnnnnnnnnnnnnnnnnnnnnnnnnnnnnnnnnnnnnnnnnnnnnnnnnnnnnnnnnnnnnnnnnnnnnnnnnnnnnnnnnnnnnnnnnnnnnnnnnnnnnnnnnnnnnnnnnnnnnnnnnnnnnnnnnnnnnnnnnnnnnnnnnnnnnnnnnnnnnnnnnnnnnnnnnnnnnnnnnnnnnnnnnnnnnnnnnnnnnnnnnnnnnnnnnnnnnnnnnnnnnnnnnnnnnnnnnnnnnnnnnnnnnnnnnnnnnnnnnnnnnnnnnnnnnnnnnnnnnnnnnnnnnnnnnnnnnnnnnnnnnnnnnnnnnnnnnnnnnnnnnnnnnnnnnnnnnnnnnnnnnnnnnnnnnnnnnnnnnnnnnnnnnnnnnnnnnnnnnnnnnnnnnnnnnnnnnnnnnnnnnnnnnnnnnnnnnnnnnnnnnnnnnnnnnnnnnnnnnnnnnnnnnnnnnnnnnnnnnnnnnnnnnnnnnnnnnnnnnnnnnnnnnnnnnnnnnnnnnnnnnnnnnnnnnnnnnnnnnnnnnnnnnnnnnnnnnnnnnnnnnnnnnnnnnnnnnnnnnnnnnnnnnnnnnnnnnnnnnnnnnnnnnnnnnnnnnnnnnnnnnnnnnnnnnnnnnnnnnnnnnnnnnnnnnnnnnnnnnnnnnnnnnnnnnnnnnnnnnnnnnnnnnnnnnnnnnnnnnnnnnnnnnnnnnnnnnnnnnnnnnnnnnnnnnnnnnnnnnnnnnnnnnnnnnnnnnnnnnnnnnnnnnnnnnnnnnnnnnnnnnnnnnnnnnnnnnnnnnnnnnnnnnnnnnnnnnnnnnnnnnnnnnnnnnnnnnnnnnnnnnnnnnnnnnnnnnnnnnnnnnnnnnnnnnnnnnnnnnnnnnnnnnnnnnnnnnnnnnnnnnnnnnnnnnnnnnnnnnnnnnnnnnnnnnnnnnnnnnnnnnnnnnnnnnnnnnnnnnnnnnnnnnnnnnnnnnnnnnnnnnnnnnnnnnnnnnnnnnnnnnnnnnnnnnnnnnnnnnnnnnnnnnnnnnnnnnnnnnnnnnnnnnnnnnnnnnnnnnnnnnnnnnnnnnnnnnnnnnnnnnnnnnnnnnnnnnnnnnnnnnnnnnnnnnnnnnnnnnnnnnnnnnnnnnnnnnnnnnnnnnnnnnnnnnnnnnnnnnnnnnnnnnnnnnnnnnnnnnnnnnnnnnnnnnnnnnnnnnnnnnnnnnnnnnnnnnnnnnnnnnnnnnnnnnnnnnnnnnnnnnnnnnnnnnnnnnnnnnnnnnnnnnnnnnnnnnnnnnnnnnnnnnnnnnnnnnnnnnnnnnnnnnnnnnnnnnnnnnnnnnnnnnnnnnnnnnnnnnnnnnnnnnnnnnnnnnnnnnnnnnnnnnnnnnnnnnnnnnnnnnnnnnnnnnnnnnnnnnnnnnnnnnnnnnnnnnnnnnnnnnnnnnnnnnnnnnnnnnnnnnnnnnnnnnnnnnnnnnnnnnnnnnnnnnnnnnnnnnnnnnnnnnnnnnnnnnnnnnnnnnnnnnnnnnnnnnnnnnnnnnnnnnnnnnnnnnnnnnnnnnnnnnnnnnnnnnnnnnnnnnnnnnnnnnnnnnnnnnnnnnnnnnnnnnnnnnnnnnnnnnnnnnnnnnnnnnnnnnnnnnnnnnnnnnnnnnnnnnnnnnnnnnnnnnnnnnnnnnnnnnnnnnnnnnnnnnnnnnnnnnnnnnnnnnnnnnnnnnnnnnnnnnnnnnnnnnnnnnnnnnnnnnnnnnnnnnnnnnnnnnnnnnnnnnnnnnnnnnnnnnnnnnnnnnnnnnnnnnnnnnnnnnnnnnnnnnnnnnnnnnnnnnnnnnnnnnnnnnnnnnnnnnnnnnnnnnnnnnnnnnnnnnnnnnnnnnnnnnnnnnnnnnnnnnnnnnnnnnnnnnnnnnnnnnnnnnnnnnnnnnnnnnnnnnnnnnnnnnnnnnnnnnnnnnnnnnnnnnnnnnnnnnnnnnnnnnnnnnnnnnnnnnnnnnnnnnnnnnnnnnnnnnnnnnnnnnnnnnnnnnnnnnnnnnnnnnnnnnnnnnnnnnnnnnnnnnnnnnnnnnnnnnnnnnnnnnnnnnnnnnnnnnnnnnnnnnnnnnnnnnnnnnnnnnnnnnnnnnnnnnnnnnnnnnnnnnnnnnnnnnnnnnnnnnnnnnnnnnnnnnnnnnnnnnnnnnnnnnnnnnnnnnnnnnnnnnnnnnnnnnnnnnnnnnnnnnnnnnnnnnnnnnnnnnnnnnnnnnnnnnnnnnnnnnnnnnnnnnnnnnnnnnnnnnnnnnnnnnnnnnnnnnnnnnnnnnnnnnnnnnnnnnnnnnnnnnnnnnnnnnnnnnnnnnnnnnnnnnnnnnnnnnnnnnnnnnnnnnnnnnnnnnnnnnnnnnnnnnnnnnnnnnnnnnnnnnnnnnnnnnnnnnnnnnnnnnnnnnnnnnnnnnnnnnnnnnnnnnnnnnnnnnnnnnnnnnnnnnnnnnnnnnnnnnnnnnnnnnnnnnnnnnnnnnnnnnnnnnnnnnnnnnnnnnnnnnnnnnnnnnnnnnnnnnnnnnnnnnnnnnnnnnnnnnnnnnnnnnnnnnnnnnnnnnnnnnnnnnnnnnnnnnnnnnnnnnnnnnnnnnnnnnnnnnnnnnnnnnnnnnnnnnnnnnnnnnnnnnnnnnnnnnnnnnnnnnnnnnnnnnnnnnnnnnnnnnnnnnnnnnnnnnnnnnnnnnnnnnnnnnnnnnnnnnnnnnnnnnnnnnnnnnnnnnnnnnnnnnnnnnnnnnnnnnnnnnnnnnnnnnnnnnnnnnnnnnnnnnnnnnnnnnnnnnnnnnnnnnnnnnnnnnnnnnnnnnnnnnnnnnnnnnnnnnnnnnnnnnnnnnnnnnnnnnnnnnnnnnnnnnnnnnnnnnnnnnnnnnnnnnnnnnnnnnnnnnnnnnnnnnnnnnnnnnnnnnnnnnnnnnnnnnnnnnnnnnnnnnnnnnnnnnnnnnnnnnnnnnnnnnnnnnnnnnnnnnnnnnnnnnnnnnnnnnnnnnnnnnnnnnnnnnnnnnnnnnnnnnnnnnnnnnnnnnnnnnnnnnnnnnnnnnnnnnnnnnnnnnnnnnnnnnnnnnnnnnnnnnnnnnnnnnnnnnnnnnnnnnnnnnnnnnnnnnnnnnnnnnnnnnnnnnnnnnnnnnnnnnnnnnnnnnnnnnnnnnnnnnnnnnnnnnnnnnnnnnnnnnnnnnnnnnnnnnnnnnnnnnnnnnnnnnnnnnnnnnnnnnnnnnnnnnnnnnnnnnnnnnnnnnnnnnnnnnnnnnnnnnnnnnnnnnnnnnnnnnnnnnnnnnnnnnnnnnnnnnnnnnnnnnnnnnnnnnnnnnnnnnnnnnnnnnnnnnnnnnnnnnnnnnnnnnnnnnnnnnnnnnnnnnnnnnnnnnnnnnnnnnnnnnnnnnnnnnnnnnnnnnnnnnnnnnnnnnnnnnnnnnnnnnnnnnnnnnnnnnnnnnnnnnnnnnnnnnnnnnnnnnnnnnnnnnnnnnnnnnnnnnnnnnnnnnnnnnnnnnnnnnnnnnnnnnnnnnnnnnnnnnnnnnnnnnnnnnnnnnnnnnnnnnnnnnnnnnnnnnnnnnnnnnnnnnnnnnnnnnnnnnnnnnnnnnnnnnnnnnnnnnnnnnnnnnnnnnnnnnnnnnnnnnnnnnnnnnnnnnnnnnnnnnnnnnnnnnnnnnnnnnnnnnnnnnnnnnnnnnnnnnnnnnnnnnnnnnnnnnnnnnnnnnnnnnnnnnnnnnnnnnnnnnnnnnnnnnnnnnnnnnnnnnnnnnnnnnnnnnnnnnnnnnnnnnnnnnnnnnnnnnnnnnnnnnnnnnnnnnnnnnnnnnnnnnnnnnnnnnnnnnnnnnnnnnnnnnnnnnnnnnnnnnnnnnnnnnnnnnnnnnnnnnnnnnnnnnnnnnnnnnnnnnnnnnnnnnnnnnnnnnnnnnnnnnnnnnnnnnnnnnnnnnnnnnnnnnnnnnnnnnnnnnnnnnnnnnnnnnnnnnnnnnnnnnnnnnnnnnnnnnnnnnnnnnnnnnnnnnnnnnnnnnnnnnnnnnnnnnnnnnnnnnnnnnnnnnnnnnnnnnnnnnnnnnnnnnnnnnnnnnnnnnnnnnnnnnnnnnnnnnnnnnnnnnnnnnnnnnnnnnnnnnnnnnnnnnnnnnnnnnnnnnnnnnnnnnnnnnnnnnnnnnnnnnnnnnnnnnnnnnnnnnnnnnnnnnnnnnnnnnnnnnnnnnnnnnnnnnnnnnnnnnnnnnnnnnnnnnnnnnnnnnnnnnnnnnnnnnnnnnnnnnnnnnnnnnnnnnnnnnnnnnnnnnnnnnnnnnnnnnnnnnnnnnnnnnnnnnnnnnnnnnnnnnnnnnnnnnnnnnnnnnnnnnnnnnnnnnnnnnnnnnnnnnnnnnnnnnnnnnnnnnnnnnnnnnnnnnnnnnnnnnnnnnnnnnnnnnnnnnnnnnnnnnnnnnnnnnnnnnnnnnnnnnnnnnnnnnnnnnnnnnnnnnnnnnnnnnnnnnnnnnnnnnnnnnnnnnnnnnnnnnnnnnnnnnnnnnnnnnnnnnnnnnnnnnnnnnnnnnnnnnnnnnnnnnnnnnnnnnnnnnnnnnnnnnnnnnnnnnnnnnnnnnnnnnnnnnnnnnnnnnnnnnnnnnnnnnnnnnnnnnnnnnnnnnnnnnnnnnnnnnnnnnnnnnnnnnnnnnnnnnnnnnnnnnnnnnnnnnnnnnnnnnnnnnnnnnnnnnnnnnnnnnnnnnnnnnnnnnnnnnnnnnnnnnnnnnnnnnnnnnnnnnnnnnnnnnnnnnnnnnnnnnnnnnnnnnnnnnnnnnnnnnnnnnnnnnnnnnnnnnnnnnnnnnnnnnnnnnnnnnnnnnnnnnnnnnnnnnnnnnnnnnnnnnnnnnnnnnnnnnnnnnnnnnnnnnnnnnnnnnnnnnnnnnnnnnnnnnnnnnnnnnnnnnnnnnnnnnnnnnnnnnnnnnnnnnnnnnnnnnnnnnnnnnnnnnnnnnnnnnnnnnnnnnnnnnnnnnnnnnnnnnnnnnnnnnnnnnnnnnnnnnnnnnnnnnnnnnnnnnnnnnnnnnnnnnnnnnnnnnnnnnnnnnnnnnnnnnnnnnnnnnnnnnnnnnnnnnnnnnnnnnnnnnnnnnnnnnnnnnnnnnnnnnnnnnnnnnnnnnnnnnnnnnnnnnnnnnnnnnnnnnnnnnnnnnnnnnnnnnnnnnnnnnnnnnnnnnnnnnnnnnnnnnnnnnnnnnnnnnnnnnnnnnnnnnnnnnnnnnnnnnnnnnnnnnnnnnnnnnnnnnnnnnnnnnnnnnnnnnnnnnnnnnnnnnnnnnnnnnnnnnnnnnnnnnnnnnnnnnnnnnnnnnnnnnnnnnnnnnnnnnnnnnnnnnnnnnnnnnnnnnnnnnnnnnnnnnnnnnnnnnnnnnnnnnnnnnnnnnnnnnnnnnnnnnnnnnnnnnnnnnnnnnnnnnnnnnnnnnnnnnnnnnnnnnnnnnnnnnnnnnnnnnnnnnnnnnnnnnnnnnnnnnnnnnnnnnnnnnnnnnnnnnnnnnnnnnnnnnnnnnnnnnnnnnnnnnnnnnnnnnnnnnnnnnnnnnnnnnnnnnnnnnnnnnnnnnnnnnnnnnnnnnnnnnnnnnnnnnnnnnnnnnnnnnnnnnnnnnnnnnnnnnnnnnnnnnnnnnnnnnnnnnnnnnnnnnnnnnnnnnnnnnnnnnnnnnnnnnnnnnnnnnnnnnnnnnnnnnnnnnnnnnnnnnnnnnnnnnnnnnnnnnnnnnnnnnnnnnnnnnnnnnnnnnnnnnnnnnnnnnnnnnnnnnnnnnnnnnnnnnnnnnnnnnnnnnnnnnnnnnnnnnnnnnnnnnnnnnnnnnnnnnnnnnnnnnnnnnnnnnnnnnnnnnnnnnnnnnnnnnnnnnnnnnnnnnnnnnnnnnnnnnnnnnnnnnnnnnnnnnnnnnnnnnnnnnnnnnnnnnnnnnnnnnnnnnnnnnnnnnnnnnnnnnnnnnnnnnnnnnnnnnnnnnnnnnnnnnnnnnnnnnnnnnnnnnnnnnnnnnnnnnnnnnnnnnnnnnnnnnnnnnnnnnnnnnnnnnnnnnnnnnnnnnnnnnnnnnnnnnnnnnnnnnnnnnnnnnnnnnnnnnnnnnnnnnnnnnnnnnnnnnnnnnnnnnnnnnnnnnnnnnnnnnnnnnnnnnnnnnnnnnnnnnnnnnnnnnnnnnnnnnnnnnnnnnnnnnnnnnnnnnnnnnnnnnnnnnnnnnnnnnnnnnnnnnnnnnnnnnnnnnnnnnnnnnnnnnnnnnnnnnnnnnnnnnnnnnnnnnnnnnnnnnnnnnnnnnnnnnnnnnnnnnnnnnnnnnnnnnnnnnnnnnnnnnnnnnnnnnnnnnnnnnnnnnnnnnnnnnnnnnnnnnnnnnnnnnnnnnnnnnnnnnnnnnnnnnnnnnnnnnnnnnnnnnnnnnnnnnnnnnnnnnnnnnnnnnnnnnnnnnnnnnnnnnnnnnnnnnnnnnnnnnnnnnnnnnnnnnnnnnnnnnnnnnnnnnnnnnnnnnnnnnnnnnnnnnnnnnnnnnnnnnnnnnnnnnnnnnnnnnnnnnnnnnnnnnnnnnnnnnnnnnnnnnnnnnnnnnnnnnnnnnnnnnnnnnnnnnnnnnnnnnnnnnnnnnnnnnnnnnnnnnnnnnnnnnnnnnnnnnnnnnnnnnnnnnnnnnnnnnnnnnnnnnnnnnnnnnnnnnnnnnnnnnnnnnnnnnnnnnnnnnnnnnnnnnnnnnnnnnnnnnnnnnnnnnnnnnnnnnnnnnnnnnnnnnnnnnnnnnnnnnnnnnnnnnnnnnnnnnnnnnnnnnnnnnnnnnnnnnnnnnnnnnnnnnnnnnnnnnnnnnnnnnnnnnnnnnnnnnnnnnnnnnnnnnnnnnnnnnnnnnnnnnnnnnnnnnnnnnnnnnnnnnnnnnnnnnnnnnnnnnnnnnnnnnnnnnnnnnnnnnnnnnnnnnnnnnnnnnnnnnnnnnnnnnnnnnnnnnnnnnnnnnnnnnnnnnnnnnnnnnnnnnnnnnnnnnnnnnnnnnnnnnnnnnnnnnnnnnnnnnnnnnnnnnnnnnnnnnnnnnnnnnnnnnnnnnnnnnnnnnnnnnnnnnnnnnnnnnnnnnnnnnnnnnnnnnnnnnnnnnnnnnnnnnnnnnnnnnnnnnnnnnnnnnnnnnnnnnnnnnnnnnnnnnnnnnnnnnnnnnnnnnnnnnnnnnnnnnnnnnnnnnnnnnnnnnnnnnnnnnnnnnnnnnnnnnnnnnnnnnnnnnnnnnnnnnnnnnnnnnnnnnnnnnnnnnnnnnnnnnnnnnnnnnnnnnnnnnnnnnnnnnnnnnnnnnnnnnnnnnnnnnnnnnnnnnnnnnnnnnnnnnnnnnnnnnnnnnnnnnnnnnnnnnnnnnnnnnnnnnnnnnnnnnnnnnnnnnnnnnnnnnnnnnnnnnnnnnnnnnnnnnnnnnnnnnnnnnnnnnnnnnnnnnnnnnnnnnnnnnnnnnnnnnnnnnnnnnnnnnnnnnnnnnnnnnnnnnnnnnnnnnnnnnnnnnnnnnnnnnnnnnnnnnnnnnnnnnnnnnnnnnnnnnnnnnnnnnnnnnnnnnnnnnnnnnnnnnnnnnnnnnnnnnnnnnnnnnnnnnnnnnnnnnnnnnnnnnnnnnnnnnnnnnnnnnnnnnnnnnnnnnnnnnnnnnnnnnnnnnnnnnnnnnnnnnnnnnnnnnnnnnnnnnnnnnnnnnnnnnnnnnnnnnnnnnnnnnnnnnnnnnnnnnnnnnnnnnnnnnnnnnnnnnnnnnnnnnnnnnnnnnnnnnnnnnnnnnnnnnnnnnnnnnnnnnnnnnnnnnnnnnnnnnnnnnnnnnnnnnnnnnnnnnnnnnnnnnnnnnnnnnnnnnnnnnnnnnnnnnnnnnnnnnnnnnnnnnnnnnnnnnnnnnnnnnnnnnnnnnnnnnnnnnnnnnnnnnnnnnnnnnnnnnnnnnnnnnnnnnnnnnnnnnnnnnnnnnnnnnnnnnnnnnnnnnnnnnnnnnnnnnnnnnnnnnnnnnnnnnnnnnnnnnnnnnnnnnnnnnnnnnnnnnnnnnnnnnnnnnnnnnnnnnnnnnnnnnnnnnnnnnnnnnnnnnnnnnnnnnnnnnnnnnnnnnnnnnnnnnnnnnnnnnnnnnnnnnnnnnnnnnnnnnnnnnnnnnnnnnnnnnnnnnnnnnnnnnnnnnnnnnnnnnnnnnnnnnnnnnnnnnnnnnnnnnnnnnnnnnnnnnnnnnnnnnnnnnnnnnnnnnnnnnnnnnnnnnnnnnnnnnnnnnnnnnnnnnnnnnnnnnnnnnnnnnnnnnnnnnnnnnnnnnnnnnnnnnnnnnnnnnnnnnnnnnnnnnnnnnnnnnnnnnnnnnnnnnnnnnnnnnnnnnnnnnnnnnnnnnnnnnnnnnnnnnnnnnnnnnnnnnnnnnnnnnnnnnnnnnnnnnnnnnnnnnnnnnnnnnnnnnnnnnnnnnnnnnnnnnnnnnnnnnnnnnnnnnnnnnnnnnnnnnnnnnnnnnnnnnnnnnnnnnnnnnnnnnnnnnnnnnnnnnnnnnnnnnnnnnnnnnnnnnnnnnnnnnnnnnnnnnnnnnnnnnnnnnnnnnnnnnnnnnnnnnnnnnnnnnnnnnnnnnnnnnnnnnnnnnnnnnnnnnnnnnnnnnnnnnnnnnnnnnnnnnnnnnnnnnnnnnnnnnnnnnnnnnnnnnnnnnnnnnnnnnnnnnnnnnnnnnnnnnnnnnnnnnnnnnnnnnnnnnnnnnnnnnnnnnnnnnnnnnnnnnnnnnnnnnnnnnnnnnnnnnnnnnnnnnnnnnnnnnnnnnnnnnnnnnnnnnnnnnnnnnnnnnnnnnnnnnnnnnnnnnnnnnnnnnnnnnnnnnnnnnnnnnnnnnnnnnnnnnnnnnnnnnnnnnnnnnnnnnnnnnnnnnnnnnnnnnnnnnnnnnnnnnnnnnnnnnnnnnnnnnnnnnnnnnnnnnnnnnnnnnnnnnnnnnnnnnnnnnnnnnnnnnnnnnnnnnnnnnnnnnnnnnnnnnnnnnnnnnnnnnnnnnnnnnnnnnnnnnnnnnnnnnnnnnnnnnnnnnnnnnnnnnnnnnnnnnnnnnnnnnnnnnnnnnnnnnnnnnnnnnnnnnnnnnnnnnnnnnnnnnnnnnnnnnnnnnnnnnnnnnnnnnnnnnnnnnnnnnnnnnnnnnnnnnnnnnnnnnnnnnnnnnnnnnnnnnnnnnnnnnnnnnnnnnnnnnnnnnnnnnnnnnnnnnnnnnnnnnnnnnnnnnnnnnnnnnnnnnnnnnnnnnnnnnnnnnnnnnnnnnnnnnnnnnnnnnnnnnnnnnnnnnnnnnnnnnnnnnnnnnnnnnnnnnnnnnnnnnnnnnnnnnnnnnnnnnnnnnnnnnnnnnnnnnnnnnnnnnnnnnnnnnnnnnnnnnnnnnnnnnnnnnnnnnnnnnnnnnnnnnnnnnnnnnnnnnnnnnnnnnnnnnnnnnnnnnnnnnnnnnnnnnnnnnnnnnnnnnnnnnnnnnnnnnnnnnnnnnnnnnnnnnnnnnnnnnnnnnnnnnnnnnnnnnnnnnnnnnnnnnnnnnnnnnnnnnnnnnnnnnnnnnnnnnnnnnnnnnnnnnnnnnnnnnnnnnnnnnnnnnnnnnnnnnnnnnnnnnnnnnnnnnnnnnnnnnnnnnnnnnnnnnnnnnnnnnnnnnnnnnnnnnnnnnnnnnnnnnnnnnnnnnnnnnnnnnnnnnnnnnnnnnnnnnnnnnnnnnnnnnnnnnnnnnnnnnnnnnnnnnnnnnnnnnnnnnnnnnnnnnnnnnnnnnnnnnnnnnnnnnnnnnnnnnnnnnnnnnnnnnnnnnnnnnnnnnnnnnnnnnnnnnnnnnnnnnnnnnnnnnnnnnnnnnnnnnnnnnnnnnnnnnnnnnnnnnnnnnnnnnnnnnnnnnnnnnnnnnnnnnnnnnnnnnnnnnnnnnnnnnnnnnnnnnnnnnnnnnnnnnnnnnnnnnnnnnnnnnnnnnnnnnnnnnnnnnnnnnnnnnnnnnnnnnnnnnnnnnnnnnnnnnnnnnnnnnnnnnnnnnnnnnnnnnnnnnnnnnnnnnnnnnnnnnnnnnnnnnnnnnnnnnnnnnnnnnnnnnnnnnnnnnnnnnnnnnnnnnnnnnnnnnnnnnnnnnnnnnnnnnnnnnnnnnnnnnnnnnnnnnnnnnnnnnnnnnnnnnnnnnnnnnnnnnnnnnnnnnnnnnnnnnnnnnnnnnnnnnnnnnnnnnnnnnnnnnnnnnnnnnnnnnnnnnnnnnnnnnnnnnnnnnnnnnnnnnnnnnnnnnnnnnnnnnnnnnnnnnnnnnnnnnnnnnnnnnnnnnnnnnnnnnnnnnnnnnnnnnnnnnnnnnnnnnnnnnnnnnnnnnnnnnnnnnnnnnnnnnnnnnnnnnnnnnnnnnnnnnnnnnnnnnnnnnnnnnnnnnnnnnnnnnnnnnnnnnnnnnnnnnnnnnnnnnnnnnnnnnnnnnnnnnnnnnnnnnnnnnnnnnnnnnnnnnnnnnnnnnnnnnnnnnnnnnnnnnnnnnnnnnnnnnnnnnnnnnnnnnnnnnnnnnnnnnnnnnnnnnnnnnnnnnnnnnnnnnnnnnnnnnnnnnnnnnnnnnnnnnnnnnnnnnnnnnnnnnnnnnnnnnnnnnnnnnnnnnnnnnnnnnnnnnnnnnnnnnnnnnnnnnnnnnnnnnnnnnnnnnnnnnnnnnnnnnnnnnnnnnnnnnnnnnnnnnnnnnnnnnnnnnnnnnnnnnnnnnnnnnnnnnnnnnnnnnnnnnnnnnnnnnnnnnnnnnnnnnnnnnnnnnnnnnnnnnnnnnnnnnnnnnnnnnnnnnnnnnnnnnnnnnnnnnnnnnnnnnnnnnnnnnnnnnnnnnnnnnnnnnnnnnnnnnnnnnnnnnnnnnnnnnnnnnnnnnnnnnnnnnnnnnnnnnnnnnnnnnnnnnnnnnnnnnnnnnnnnnnnnnnnnnnnnnnnnnnnnnnnnnnnnnnnnnnnnnnnnnnnnnnnnnnnnnnnnnnnnnnnnnnnnnnnnnnnnnnnnnnnnnnnnnnnnnnnnnnnnnnnnnnnnnnnnnnnnnnnnnnnnnnnnnnnnnnnnnnnnnnnnnnnnnnnnnnnnnnnnnnnnnnnnnnnnnnnnnnnnnnnnnnnnnnnnnnnnnnnnnnnnnnnnnnnnnnnnnnnnnnnnnnnnnnnnnnnnnnnnnnnnnnnnnnnnnnnnnnnnnnnnnnnnnnnnnnnnnnnnnnnnnnnnnnnnnnnnnnnnnnnnnnnnnnnnnnnnnnnnnnnnnnnnnnnnnnnnnnnnnnnnnnnnnnnnnnnnnnnnnnnnnnnnnnnnnnnnnnnnnnnnnnnnnnnnnnnnnnnnnnnnnnnnnnnnnnnnnnnnnnnnnnnnnnnnnnnnnnnnnnnnnnnnnnnnnnnnnnnnnnnnnnnnnnnnnnnnnnnnnnnnnnnnnnnnnnnnnnnnnnnnnnnnnnnnnnnnnnnnnnnnnnnnnnnnnnnnnnnnnnnnnnnnnnnnnnnnnnnnnnnnnnnnnnnnnnnnnnnnnnnnnnnnnnnnnnnnnnnnnnnnnnnnnnnnnnnnnnnnnnnnnnnnnnnnnnnnnnnnnnnnnnnnnnnnnnnnnnnnnnnnnnnnnnnnnnnnnnnnnnnnnnnnnnnnnnnnnnnnnnnnnnnnnnnnnnnnnnnnnnnnnnnnnnnnnnnnnnnnnnnnnnnnnnnnnnnnnnnnnnnnnnnnnnnnnnnnnnnnnnnnnnnnnnnnnnnnnnnnnnnnnnnnnnnnnnnnnnnnnnnnnnnnnnnnnnnnnnnnnnnnnnnnnnnnnnnnnnnnnnnnnnnnnnnnnnnnnnnnnnnnnnnnnnnnnnnnnnnnnnnnnnnnnnnnnnnnnnnnnnnnnnnnnnnnnnnnnnnnnnnnnnnnnnnnnnnnnnnnnnnnnnnnnnnnnnnnnnnnnnnnnnnnnnnnnnnnnnnnnnnnnnnnnnnnnnnnnnnnnnnnnnnnnnnnnnnnnnnnnnnnnnnnnnnnnnnnnnnnnnnnnnnnnnnnnnnnnnnnnnnnnnnnnnnnnnnnnnnnnnnnnnnnnnnnnnnnnnnnnnnnnnnnnnnnnnnnnnnnnnnnnnnnnnnnnnnnnnnnnnnnnnnnnnnnnnnnnnnnnnnnnnnnnnnnnnnnnnnnnnnnnnnnnnnnnnnnnnnnnnnnnnnnnnnnnnnnnnnnnnnnnnnnnnnnnnnnnnnnnnnnnnnnnnnnnnnnnnnnnnnnnnnnnnnnnnnnnnnnnnnnnnnnnnnnnnnnnnnnnnnnnnnnnnnnnnnnnnnnnnnnnnnnnnnnnnnnnnnnnnnnnnnnnnnnnnnnnnnnnnnnnnnnnnnnnnnnnnnnnnnnnnnnnnnnnnnnnnnnnnnnnnnnnnnnnnnnnnnnnnnnnnnnnnnnnnnnnnnnnnnnnnnnnnnnnnnnnnnnnnnnnnnnnnnnnnnnnnnnnnnnnnnnnnnnnnnnnnnnnnnnnnnnnnnnnnnnnnnnnnnnnnnnnnnnnnnnnnnnnnnnnnnnnnnnnnnnnnnnnnnnnnnnnnnnnnnnnnnnnnnnnnnnnnnnnnnnnnnnnnnnnnnnnnnnnnnnnnnnnnnnnnnnnnnnnnnnnnnnnnnnnnnnnnnnnnnnnnnnnnnnnnnnnnnnnnnnnnnnnnnnnnnnnnnnnnnnnnnnnnnnnnnnnnnnnnnnnnnnnnnnnnnnnnnnnnnnnnnnnnnnnnnnnnnnnnnnnnnnnnnnnnnnnnnnnnnnnnnnnnnnnnnnnnnnnnnnnnnnnnnnnnnnnnnnnnnnnnnnnnnnnnnnnnnnnnnnnnnnnnnnnnnnnnnnnnnnnnnnnnnnnnnnnnnnnnnnnnnnnnnnnnnnnnnnnnnnnnnnnnnnnnnnnnnnnnnnnnnnnnnnnnnnnnnnnnnnnnnnnnnnnnnnnnnnnnnnnnnnnnnnnnnnnnnnnnnnnnnnnnnnnnnnnnnnnnnnnnnnnnnnnnnnnnnnnnnnnnnnnnnnnnnnnnnnnnnnnnnnnnnnnnnnnnnnnnnnnnnnnnnnnnnnnnnnnnnnnnnnnnnnnnnnnnnnnnnnnnnnnnnnnnnnnnnnnnnnnnnnnnnnnnnnnnnnnnnnnnnnnnnnnnnnnnnnnnnnnnnnnnnnnnnnnnnnnnnnnnnnnnnnnnnnnnnnnnnnnnnnnnnnnnnnnnnnnnnnnnnnnnnnnnnnnnnnnnnnnnnnnnnnnnnnnnnnnnnnnnnnnnnnnnnnnnnnnnnnnnnnnnnnnnnnnnnnnnnnnnnnnnnnnnnnnnnnnnnnnnnnnnnnnnnnnnnnnnnnnnnnnnnnnnnnnnnnnnnnnnnnnnnnnnnnnnnnnnnnnnnnnnnnnnnnnnnnnnnnnnnnnnnnnnnnnnnnnnnnnnnnnnnnnnnnnnnnnnnnnnnnnnnnnnnnnnnnnnnnnnnnnnnnnnnnnnnnnnnnnnnnnnnnnnnnnnnnnnnnnnnnnnnnnnnnnnnnnnnnnnnnnnnnnnnnnnnnnnnnnnnnnnnnnnnnnnnnnnnnnnnnnnnnnnnnnnnnnnnnnnnnnnnnnnnnnnnnnnnnnnnnnnnnnnnnnnnnnnnnnnnnnnnnnnnnnnnnnnnnnnnnnnnnnnnnnnnnnnnnnnnnnnnnnnnnnnnnnnnnnnnnnnnnnnnnnnnnnnnnnnnnnnnnnnnnnnnnnnnnnnnnnnnnnnnnnnnnnnnnnnnnnnnnnnnnnnnnnnnnnnnnnnnnnnnnnnnnnnnnnnnnnnnnnnnnnnnnnnnnnnnnnnnnnnnnnnnnnnnnnnnnnnnnnnnnnnnnnnnnnnnnnnnnnnnnnnnnnnnnnnnnnnnnnnnnnnnnnnnnnnnnnnnnnnnnnnnnnnnnnnnnnnnnnnnnnnnnnnnnnnnnnnnnnnnnnnnnnnnnnnnnnnnnnnnnnnnnnnnnnnnnnnnnnnnnnnnnnnnnnnnnnnnnnnnnnnnnnnnnnnnnnnnnnnnnnnnnnnnnnnnnnnnnnnnnnnnnnnnnnnnnnnnnnnnnnnnnnnnnnnnnnnnnnnnnnnnnnnnnnnnnnnnnnnnnnnnnnnnnnnnnnnnnnnnnnnnnnnnnnnnnnnnnnnnnnnnnnnnnnnnnnnnnnnnnnnnnnnnnnnnnnnnnnnnnnnnnnnnnnnnnnnnnnnnnnnnnnnnnnnnnnnnnnnnnnnnnnnnnnnnnnnnnnnnnnnnnnnnnnnnnnnnnnnnnnnnnnnnnnnnnnnnnnnnnnnnnnnnnnnnnnnnnnnnnnnnnnnnnnnnnnnnnnnnnnnnnnnnnnnnnnnnnnnnnnnnnnnnnnnnnnnnnnnnnnnnnnnnnnnnnnnnnnnnnnnnnnnnnnnnnnnnnnnnnnnnnnnnnnnnnnnnnnnnnnnnnnnnnnnnnnnnnnnnnnnnnnnnnnnnnnnnnnnnnnnnnnnnnnnnnnnnnnnnnnnnnnnnnnnnnnnnnnnnnnnnnnnnnnnnnnnnnnnnnnnnnnnnnnnnnnnnnnnnnnnnnnnnnnnnnnnnnnnnnnnnnnnnnnnnnnnnnnnnnnnnnnnnnnnnnnnnnnnnnnnnnnnnnnnnnnnnnnnnnnnnnnnnnnnnnnnnnnnnnnnnnnnnnnnnnnnnnnnnnnnnnnnnnnnnnnnnnnnnnnnnnnnnnnnnnnnnnnnnnnnnnnnnnnnnnnnnnnnnnnnnnnnnnnnnnnnnnnnnnnnnnnnnnnnnnnnnnnnnnnnnnnnnnnnnnnnnnnnnnnnnnnnnnnnnnnnnnnnnnnnnnnnnnnnnnnnnnnnnnnnnnnnnnnnnnnnnnnnnnnnnnnnnnnnnnnnnnnnnnnnnnnnnnnnnnnnnnnnnnnnnnnnnnnnnnnnnnnnnnnnnnnnnnnnnnnnnnnnnnnnnnnnnnnnnnnnnnnnnnnnnnnnnnnnnnnnnnnnnnnnnnnnnnnnnnnnnnnnnnnnnnnnnnnnnnnnnnnnnnnnnnnnnnnnnnnnnnnnnnnnnnnnnnnnnnnnnnnnnnnnnnnnnnnnnnnnnnnnnnnnnnnnnnnnnnnnnnnnnnnnnnnnnnnnnnnnnnnnnnnnnnnnnnnnnnnnnnnnnnnnnnnnnnnnnnnnnnnnnnnnnnnnnnnnnnnnnnnnnnnnnnnnnnnnnnnnnnnnnnnnnnnnnnnnnnnnnnnnnnnnnnnnnnnnnnnnnnnnnnnnnnnnnnnnnnnnnnnnnnnnnnnnnnnnnnnnnnnnnnnnnnnnnnnnnnnnnnnnnnnnnnnnnnnnnnnnnnnnnnnnnnnnnnnnnnnnnnnnnnnnnnnnnnnnnnnnnnnnnnnnnnnnnnnnnnnnnnnnnnnnnnnnnnnnnnnnnnnnnnnnnnnnnnnnnnnnnnnnnnnnnnnnnnnnnnnnnnnnnnnnnnnnnnnnnnnnnnnnnnnnnnnnnnnnnnnnnnnnnnnnnnnnnnnnnnnnnnnnnnnnnnnnnnnnnnnnnnnnnnnnnnnnnnnnnnnnnnnnnnnnnnnnnnnnnnnnnnnnnnnnnnnnnnnnnnnnnnnnnnnnnnnnnnnnnnnnnnnnnnnnnnnnnnnnnnnnnnnnnnnnnnnnnnnnnnnnnnnnnnnnnnnnnnnnnnnnnnnnnnnnnnnnnnnnnnnnnnnnnnnnnnnnnnnnnnnnnnnnnnnnnnnnnnnnnnnnnnnnnnnnnnnnnnnnnnnnnnnnnnnnnnnnnnnnnnnnnnnnnnnnnnnnnnnnnnnnnnnnnnnnnnnnnnnnnnnnnnnnnnnnnnnnnnnnnnnnnnnnnnnnnnnnnnnnnnnnnnnnnnnnnnnnnnnnnnnnnnnnnnnnnnnnnnnnnnnnnnnnnnnnnnnnnnnnnnnnnnnnnnnnnnnnnnnnnnnnnnnnnnnnnnnnnnnnnnnnnnnnnnnnnnnnnnnnnnnnnnnnnnnnnnnnnnnnnnnnnnnnnnnnnnnnnnnnnnnnnnnnnnnnnnnnnnnnnnnnnnnnnnnnnnnnnnnnnnnnnnnnnnnnnnnnnnnnnnnnnnnnnnnnnnnnnnnnnnnnnnnnnnnnnnnnnnnnnnnnnnnnnnnnnnnnnnnnnnnnnnnnnnnnnnnnnnnnnnnnnnnnnnnnnnnnnnnnnnnnnnnnnnnnnnnnnnnnnnnnnnnnnnnnnnnnnnnnnnnnnnnnnnnnnnnnnnnnnnnnnnnnnnnnnnnnnnnnnnnnnnnnnnnnnnnnnnnnnnnnnnnnnnnnnnnnnnnnnnnnnnnnnnnnnnnnnnnnnnnnnnnnnnnnnnnnnnnnnnnnnnnnnnnnnnnnnnnnnnnnnnnnnnnnnnnnnnnnnnnnnnnnnnnnnnnnnnnnnnnnnnnnnnnnnnnnnnnnnnnnnnnnnnnnnnnnnnnnnnnnnnnnnnnnnnnnnnnnnnnnnnnnnnnnnnnnnnnnnnnnnnnnnnnnnnnnnnnnnnnnnnnnnnnnnnnnnnnnnnnnnnnnnnnnnnnnnnnnnnnnnnnnnnnnnnnnnnnnnnnnnnnnnnnnnnnnnnnnnnnnnnnnnnnnnnnnnnnnnnnnnnnnnnnnnnnnnnnnnnnnnnnnnnnnnnnnnnnnnnnnnnnnnnnnnnnnnnnnnnnnnnnnnnnnnnnnnnnnnnnnnnnnnnnnnnnnnnnnnnnnnnnnnnnnnnnnnnnnnnnnnnnnnnnnnnnnnnnnnnnnnnnnnnnnnnnnnnnnnnnnnnnnnnnnnnnnnnnnnnnnnnnnnnnnnnnnnnnnnnnnnnnnnnnnnnnnnnnnnnnnnnnnnnnnnnnnnnnnnnnnnnnnnnnnnnnnnnnnnnnnnnnnnnnnnnnnnnnnnnnnnnnnnnnnnnnnnnnnnnnnnnnnnnnnnnnnnnnnnnnnnnnnnnnnnnnnnnnnnnnnnnnnnnnnnnnnnnnnnnnnnnnnnnnnnnnnnnnnnnnnnnnnnnnnnnnnnnnnnnnnnnnnnnnnnnnnnnnnnnnnnnnnnnnnnnnnnnnnnnnnnnnnnnnnnnnnnnnnnnnnnnnnnnnnnnnnnnnnnnnnnnnnnnnnnnnnnnnnnnnnnnnnnnnnnnnnnnnnnnnnnnnnnnnnnnnnnnnnnnnnnnnnnnnnnnnnnnnnnnnnnnnnnnnnnnnnnnnnnnnnnnnnnnnnnnnnnnnnnnnnnnnnnnnnnnnnnnnnnnnnnnnnnnnnnnnnnnnnnnnnnnnnnnnnnnnnnnnnnnnnnnnnnnnnnnnnnnnnnnnnnnnnnnnnnnnnnnnnnnnnnnnnnnnnnnnnnnnnnnnnnnnnnnnnnnnnnnnnnnnnnnnnnnnnnnnnnnnnnnnnnnnnnnnnnnnnnnnnnnnnnnnnnnnnnnnnnnnnnnnnnnnnnnnnnnnnnnnnnnnnnnnnnnnnnnnnnnnnnnnnnnnnnnnnnnnnnnnnnnnnnnnnnnnnnnnnnnnnnnnnnnnnnnnnnnnnnnnnnnnnnnnnnnnnnnnnnnnnnnnnnnnnnnnnnnnnnnnnnnnnnnnnnnnnnnnnnnnnnnnnnnnnnnnnnnnnnnnnnnnnnnnnnnnnnnnnnnnnnnnnnnnnnnnnnnnnnnnnnnnnnnnnnnnnnnnnnnnnnnnnnnnnnnnnnnnnnnnnnnnnnnnnnnnnnnnnnnnnnnnnnnnnnnnnnnnnnnnnnnnnnnnnnnnnnnnnnnnnnnnnnnnnnnnnnnnnnnnnnnnnnnnnnnnnnnnnnnnnnnnnnnnnnnnnnnnnnnnnnnnnnnnnnnnnnnnnnnnnnnnnnnnnnnnnnnnnnnnnnnnnnnnnnnnnnnnnnnnnnnnnnnnnnnnnnnnnnnnnnnnnnnnnnnnnnnnnnnnnnnnnnnnnnnnnnnnnnnnnnnnnnnnnnnnnnnnnnnnnnnnnnnnnnnnnnnnnnnnnnnnnnnnnnnnnnnnnnnnnnnnnnnnnnnnnnnnnnnnnnnnnnnnnnnnnnnnnnnnnnnnnnnnnnnnnnnnnnnnnnnnnnnnnnnnnnnnnnnnnnnnnnnnnnnnnnnnnnnnnnnnnnnnnnnnnnnnnnnnnnnnnnnnnnnnnnnnnnnnnnnnnnnnnnnnnnnnnnnnnnnnnnnnnnnnnnnnnnnnnnnnnnnnnnnnnnnnnnnnnnnnnnnnnnnnnnnnnnnnnnnnnnnnnnnnnnnnnnnnnnnnnnnnnnnnnnnnnnnnnnnnnnnnnnnnnnnnnnnnnnnnnnnnnnnnnnnnnnnnnnnnnnnnnnnnnnnnnnnnnnnnnnnnnnnnnnnnnnnnnnnnnnnnnnnnnnnnnnnnnnnnnnnnnnnnnnnnnnnnnnnnnnnnnnnnnnnnnnnnnnnnnnnnnnnnnnnnnnnnnnnnnnnnnnnnnnnnnnnnnnnnnnnnnnnnnnnnnnnnnnnnnnnnnnnnnnnnnnnnnnnnnnnnnnnnnnnnnnnnnnnnnnnnnnnnnnnnnnnnnnnnnnnnnnnnnnnnnnnnnnnnnnnnnnnnnnnnnnnnnnnnnnnnnnnnnnnnnnnnnnnnnnnnnnnnnnnnnnnnnnnnnnnnnnnnnnnnnnnnnnnnnnnnnnnnnnnnnnnnnnnnnnnnnnnnnnnnnnnnnnnnnnnnnnnnnnnnnnnnnnnnnnnnnnnnnnnnnnnnnnnnnnnnnnnnnnnnnnnnnnnnnnnnnnnnnnnnnnnnnnnnnnnnnnnnnnnnnnnnnnnnnnnnnnnnnnnnnnnnnnnnnnnnnnnnnnnnnnnnnnnnnnnnnnnnnnnnnnnnnnnnnnnnnnnnnnnnnnnnnnnnnnnnnnnnnnnnnnnnnnnnnnnnnnnnnnnnnnnnnnnnnnnnnnnnnnnnnnnnnnnnnnnnnnnnnnnnnnnnnnnnnnnnnnnnnnnnnnnnnnnnnnnnnnnnnnnnnnnnnnnnnnnnnnnnnnnnnnnnnnnnnnnnnnnnnnnnnnnnnnnnnnnnnnnnnnnnnnnnnnnnnnnnnnnnnnnnnnnnnnnnnnnnnnnnnnnnnnnnnnnnnnnnnnnnnnnnnnnnnnnnnnnnnnnnnnnnnnnnnnnnnnnnnnnnnnnnnnnnnnnnnnnnnnnnnnnnnnnnnnnnnnnnnnnnnnnnnnnnnnnnnnnnnnnnnnnnnnnnnnnnnnnnnnnnnnnnnnnnnnnnnnnnnnnnnnnnnnnnnnnnnnnnnnnnnnnnnnnnnnnnnnnnnnnnnnnnnnnnnnnnnnnnnnnnnnnnnnnnnnnnnnnnnnnnnnnnnnnnnnnnnnnnnnnnnnnnnnnnnnnnnnnnnnnnnnnnnnnnnnnnnnnnnnnnnnnnnnnnnnnnnnnnnnnnnnnnnnnnnnnnnnnnnnnnnnnnnnnnnnnnnnnnnnnnnnnnnnnnnnnnnnnnnnnnnnnnnnnnnnnnnnnnnnnnnnnnnnnnnnnnnnnnnnnnnnnnnnnnnnnnnnnnnnnnnnnnnnnnnnnnnnnnnnnnnnnnnnnnnnnnnnnnnnnnnnnnnnnnnnnnnnnnnnnnnnnnnnnnnnnnnnnnnnnnnnnnnnnnnnnnnnnnnnnnnnnnnnnnnnnnnnnnnnnnnnnnnnnnnnnnnnnnnnnnnnnnnnnnnnnnnnnnnnnnnnnnnnnnnnnnnnnnnnnnnnnnnnnnnnnnnnnnnnnnnnnnnnnnnnnnnnnnnnnnnnnnnnnnnnnnnnnnnnnnnnnnnnnnnnnnnnnnnnnnnnnnnnnnnnnnnnnnnnnnnnnnnnnnnnnnnnnnnnnnnnnnnnnnnnnnnnnnnnnnnnnnnnnnnnnnnnnnnnnnnnnnnnnnnnnnnnnnnnnnnnnnnnnnnnnnnnnnnnnnnnnnnnnnnnnnnnnnnnnnnnnnnnnnnnnnnnnnnnnnnnnnnnnnnnnnnnnnnnnnnnnnnnnnnnnnnnnnnnnnnnnnnnnnnnnnnnnnnnnnnnnnnnnnnnnnnnnnnnnnnnnnnnnnnnnnnnnnnnnnnnnnnnnnnnnnnnnnnnnnnnnnnnnnnnnnnnnnnnnnnnnnnnnnnnnnnnnnnnnnnnnnnnnnnnnnnnnnnnnnnnnnnnnnnnnnnnnnnnnnnnnnnnnnnnnnnnnnnnnnnnnnnnnnnnnnnnnnnnnnnnnnnnnnnnnnnnnnnnnnnnnnnnnnnnnnnnnnnnnnnnnnnnnnnnnnnnnnnnnnnnnnnnnnnnnnnnnnnnnnnnnnnnnnnnnnnnnnnnnnnnnnnnnnnnnnnnnnnnnnnnnnnnnnnnnnnnnnnnnnnnnnnnnnnnnnnnnnnnnnnnnnnnnnnnnnnnnnnnnnnnnnnnnnnnnnnnnnnnnnnnnnnnnnnnnnnnnnnnnnnnnnnnnnnnnnnnnnnnnnnnnnnnnnnnnnnnnnnnnnnnnnnnnnnnnnnnnnnnnnnnnnnnnnnnnnnnnnnnnnnnnnnnnnnnnnnnnnnnnnnnnnnnnnnnnnnnnnnnnnnnnnnnnnnnnnnnnnnnnnnnnnnnnnnnnnnnnnnnnnnnnnnnnnnnnnnnnnnnnnnnnnnnnnnnnnnnnnnnnnnnnnnnnnnnnnnnnnnnnnnnnnnnnnnnnnnnnnnnnnnnnnnnnnnnnnnnnnnnnnnnnnnnnnnnnnnnnnnnnnnnnnnnnnnnnnnnnnnnnnnnnnnnnnnnnnnnnnnnnnnnnnnnnnnnnnnnnnnnnnnnnnnnnnnnnnnnnnnnnnnnnnnnnnnnnnnnnnnnnnnnnnnnnnnnnnnnnnnnnnnnnnnnnnnnnnnnnnnnnnnnnnnnnnnnnnnnnnnnnnnnnnnnnnnnnnnnnnnnnnnnnnnnnnnnnnnnnnnnnnnnnnnnnnnnnnnnnnnnnnnnnnnnnnnnnnnnnnnnnnnnnnnnnnnnnnnnnnnnnnnnnnnnnnnnnnnnnnnnnnnnnnnnnnnnnnnnnnnnnnnnnnnnnnnnnnnnnnnnnnnnnnnnnnnnnnnnnnnnnnnnnnnnnnnnnnnnnnnnnnnnnnnnnnnnnnnnnnnnnnnnnnnnnnnnnnnnnnnnnnnnnnnnnnnnnnnnnnnnnnnnnnnnnnnnnnnnnnnnnnnnnnnnnnnnnnnnnnnnnnnnnnnnnnnnnnnnnnnnnnnnnnnnnnnnnnnnnnnnnnnnnnnnnnnnnnnnnnnnnnnnnnnnnnnnnnnnnnnnnnnnnnnnnnnnnnnnnnnnnnnnnnnnnnnnnnnnnnnnnnnnnnnnnnnnnnnnnnnnnnnnnnnnnnnnnnnnnnnnnnnnnnnnnnnnnnnnnnnnnnnnnnnnnnnnnnnnnnnnnnnnnnnnnnnnnnnnnnnnnnnnnnnnnnnnnnnnnnnnnnnnnnnnnnnnnnnnnnnnnnnnnnnnnnnnnnnnnnnnnnnnnnnnnnnnnnnnnnnnnnnnnnnnnnnnnnnnnnnnnnnnnnnnnnnnnnnnnnnnnnnnnnnnnnnnnnnnnnnnnnnnnnnnnnnnnnnnnnnnnnnnnnnnnnnnnnnnnnnnnnnnnnnnnnnnnnnnnnnnnnnnnnnnnnnnnnnnnnnnnnnnnnnnnnnnnnnnnnnnnnnnnnnnnnnnnnnnnnnnnnnnnnnnnnnnnnnnnnnnnnnnnnnnnnnnnnnnnnnnnnnnnnnnnnnnnnnnnnnnnnnnnnnnnnnnnnnnnnnnnnnnnnnnnnnnnnnnnnnnnnnnnnnnnnnnnnnnnnnnnnnnnnnnnnnnnnnnnnnnnnnnnnnnnnnnnnnnnnnnnnnnnnnnnnnnnnnnnnnnnnnnnnnnnnnnnnnnnnnnnnnnnnnnnnnnnnnnnnnnnnnnnnnnnnnnnnnnnnnnnnnnnnnnnnnnnnnnnnnnnnnnnnnnnnnnnnnnnnnnnnnnnnnnnnnnnnnnnnnnnnnnnnnnnnnnnnnnnnnnnnnnnnnnnnnnnnnnnnnnnnnnnnnnnnnnnnnnnnnnnnnnnnnnnnnnnnnnnnnnnnnnnnnnnnnnnnnnnnnnnnnnnnnnnnnnnnnnnnnnnnnnnnnnnnnnnnnnnnnnnnnnnnnnnnnnnnnnnnnnnnnnnnnnnnnnnnnnnnnnnnnnnnnnnnnnnnnnnnnnnnnnnnnnnnnnnnnnnnnnnnnnnnnnnnnnnnnnnnnnnnnnnnnnnnnnnnnnnnnnnnnnnnnnnnnnnnnnnnnnnnnnnnnnnnnnnnnnnnnnnnnnnnnnnnnnnnnnnnnnnnnnnnnnnnnnnnnnnnnnnnnnnnnnnnnnnnnnnnnnnnnnnnnnnnnnnnnnnnnnnnnnnnnnnnnnnnnnnnnnnnnnnnnnnnnnnnnnnnnnnnnnnnnnnnnnnnnnnnnnnnnnnnnnnnnnnnnnnnnnnnnnnnnnnnnnnnnnnnnnnnnnnnnnnnnnnnnnnnnnnnnnnnnnnnnnnnnnnnnnnnnnnnnnnnnnnnnnnnnnnnnnnnnnnnnnnnnnnnnnnnnnnnnnnnnnnnnnnnnnnnnnnnnnnnnnnnnnnnnnnnnnnnnnnnnnnnnnnnnnnnnnnnnnnnnnnnnnnnnnnnnnnnnnnnnnnnnnnnnnnnnnnnnnnnnnnnnnnnnnnnnnnnnnnnnnnnnnnnnnnnnnnnnnnnnnnnnnnnnnnnnnnnnnnnnnnnnnnnnnnnnnnnnnnnnnnnnnnnnnnnnnnnnnnnnnnnnnnnnnnnnnnnnnnnnnnnnnnnnnnnnnnnnnnnnnnnnnnnnnnnnnnnnnnnnnnnnnnnnnnnnnnnnnnnnnnnnnnnnnnnnnnnnnnnnnnnnnnnnnnnnnnnnnnnnnnnnnnnnnnnnnnnnnnnnnnnnnnnnnnnnnnnnnnnnnnnnnnnnnnnnnnnnnnnnnnnnnnnnnnnnnnnnnnnnnnnnnnnnnnnnnnnnnnnnnnnnnnnnnnnnnnnnnnnnnnnnnnnnnnnnnnnnnnnnnnnnnnnnnnnnnnnnnnnnnnnnnnnnnnnnnnnnnnnnnnnnnnnnnnnnnnnnnnnnnnnnnnnnnnnnnnnnnnnnnnnnnnnnnnnnnnnnnnnnnnnnnnnnnnnnnnnnnnnnnnnnnnnnnnnnnnnnnnnnnnnnnnnnnnnnnnnnnnnnnnnnnnnnnnnnnnnnnnnnnnnnnnnnnnnnnnnnnnnnnnnnnnnnnnnnnnnnnnnnnnnnnnnnnnnnnnnnnnnnnnnnnnnnnnnnnnnnnnnnnnnnnnnnnnnnnnnnnnnnnnnnnnnnnnnnnnnnnnnnnnnnnnnnnnnnnnnnnnnnnnnnnnnnnnnnnnnnnnnnnnnnnnnnnnnnnnnnnnnnnnnnnnnnnnnnnnnnnnnnnnnnnnnnnnnnnnnnnnnnnnnnnnnnnnnnnnnnnnnnnnnnnnnnnnnnnnnnnnnnnnnnnnnnnnnnnnnnnnnnnnnnnnnnnnnnnnnnnnnnnnnnnnnnnnnnnnnnnnnnnnnnnnnnnnnnnnnnnnnnnnnnnnnnnnnnnnnnnnnnnnnnnnnnnnnnnnnnnnnnnnnnnnnnnnnnnnnnnnnnnnnnnnnnnnnnnnnnnnnnnnnnnnnnnnnnnnnnnnnnnnnnnnnnnnnnnnnnnnnnnnnnnnnnnnnnnnnnnnnnnnnnnnnnnnnnnnnnnnnnnnnnnnnnnnnnnnnnnnnnnnnnnnnnnnnnnnnnnnnnnnnnnnnnnnnnnnnnnnnnnnnnnnnnnnnnnnnnnnnnnnnnnnnnnnnnnnnnnnnnnnnnnnnnnnnnnnnnnnnnnnnnnnnnnnnnnnnnnnnnnnnnnnnnnnnnnnnnnnnnnnnnnnnnnnnnnnnnnnnnnnnnnnnnnnnnnnnnnnnnnnnnnnnnnnnnnnnnnnnnnnnnnnnnnnnnnnnnnnnnnnnnnnnnnnnnnnnnnnnnnnnnnnnnnnnnnnnnnnnnnnnnnnnnnnnnnnnnnnnnnnnnnnnnnnnnnnnnnnnnnnnnnnnnnnnnnnnnnnnnnnnnnnnnnnnnnnnnnnnnnnnnnnnnnnnnnnnnnnnnnnnnnnnnnnnnnnnnnnnnnnnnnnnnnnnnnnnnnnnnnnnnnnnnnnnnnnnnnnnnnnnnnnnnnnnnnnnnnnnnnnnnnnnnnnnnnnnnnnnnnnnnnnnnnnnnnnnnnnnnnnnnnnnnnnnnnnnnnnnnnnnnnnnnnnnnnnnnnnnnnnnnnnnnnnnnnnnnnnnnnnnnnnnnnnnnnnnnnnnnnnnnnnnnnnnnnnnnnnnnnnnnnnnnnnnnnnnnnnnnnnnnnnnnnnnnnnnnnnnnnnnnnnnnnnnnnnnnnnnnnnnnnnnnnnnnnnnnnnnnnnnnnnnnnnnnnnnnnnnnnnnnnnnnnnnnnnnnnnnnnnnnnnnnnnnnnnnnnnnnnnnnnnnnnnnnnnnnnnnnnnnnnnnnnnnnnnnnnnnnnnnnnnnnnnnnnnnnnnnnnnnnnnnnnnnnnnnnnnnnnnnnnnnnnnnnnnnnnnnnnnnnnnnnnnnnnnnnnnnnnnnnnnnnnnnnnnnnnnnnnnnnnnnnnnnnnnnnnnnnnnnnnnnnnnnnnnnnnnnnnnnnnnnnnnnnnnnnnnnnnnnnnnnnnnnnnnnnnnnnnnnnnnnnnnnnnnnnnnnnnnnnnnnnnnnnnnnnnnnnnnnnnnnnnnnnnnnnnnnnnnnnnnnnnnnnnnnnnnnnnnnnnnnnnnnnnnnnnnnnnnnnnnnnnnnnnnnnnnnnnnnnnnnnnnnnnnnnnnnnnnnnnnnnnnnnnnnnnnnnnnnnnnnnnnnnnnnnnnnnnnnnnnnnnnnnnnnnnnnnnnnnnnnnnnnnnnnnnnnnnnnnnnnnnnnnnnnnnnnnnnnnnnnnnnnnnnnnnnnnnnnnnnnnnnnnnnnnnnnnnnnnnnnnnnnnnnnnnnnnnnnnnnnnnnnnnnnnnnnnnnnnnnnnnnnnnnnnnnnnnnnnnnnnnnnnnnnnnnnnnnnnnnnnnnnnnnnnnnnnnnnnnnnnnnnnnnnnnnnnnnnnnnnnnnnnnnnnnnnnnnnnnnnnnnnnnnnnnnnnnnnnnnnnnnnnnnnnnnnnnnnnnnnnnnnnnnnnnnnnnnnnnnnnnnnnnnnnnnnnnnnnnnnnnnnnnnnnnnnnnnnnnnnnnnnnnnnnnnnnnnnnnnnnnnnnnnnnnnnnnnnnnnnnnnnnnnnnnnnnnnnnnnnnnnnnnnnnnnnnnnnnnnnnnnnnnnnnnnnnnnnnnnnnnnnnnnnnnnnnnnnnnnnnnnnnnnnnnnnnnnnnnnnnnnnnnnnnnnnnnnnnnnnnnnnnnnnnnnnnnnnnnnnnnnnnnnnnnnnnnnnnnnnnnnnnnnnnnnnnnnnnnnnnnnnnnnnnnnnnnnnnnnnnnnnnnnnnnnnnnnnnnnnnnnnnnnnnnnnnnnnnnnnnnnnnnnnnnnnnnnnnnnnnnnnnnnnnnnnnnnnnnnnnnnnnnnnnnnnnnnnnnnnnnnnnnnnnnnnnnnnnnnnnnnnnnnnnnnnnnnnnnnnnnnnnnnnnnnnnnnnnnnnnnnnnnnnnnnnnnnnnnnnnnnnnnnnnnnnnnnnnnnnnnnnnnnnnnnnnnnnnnnnnnnnnnnnnnnnnnnnnnnnnnnnnnnnnnnnnnnnnnnnnnnnnnnnnnnnnnnnnnnnnnnnnnnnnnnnnnnnnnnnnnnnnnnnnnnnnnnnnnnnnnnnnnnnnnnnnnnnnnnnnnnnnnnnnnnnnnnnnnnnnnnnnnnnnnnnnnnnnnnnnnnnnnnnnnnnnnnnnnnnnnnnnnnnnnnnnnnnnnnnnnnnnnnnnnnnnnnnnnnnnnnnnnnnnnnnnnnnnnnnnnnnnnnnnnnnnnnnnnnnnnnnnnnnnnnnnnnnnnnnnnnnnnnnnnnnnnnnnnnnnnnnnnnnnnnnnnnnnnnnnnnnnnnnnnnnnnnnnnnnnnnnnnnnnnnnnnnnnnnnnnnnnnnnnnnnnnnnnnnnnnnnnnnnnnnnnnnnnnnnnnnnnnnnnnnnnnnnnnnnnnnnnnnnnnnnnnnnnnnnnnnnnnnnnnnnnnnnnnnnnnnnnnnnnnnnnnnnnnnnnnnnnnnnnnnnnnnnnnnnnnnnnnnnnnnnnnnnnnnnnnnnnnnnnnnnnnnnnnnnnnnnnnnnnnnnnnnnnnnnnnnnnnnnnnnnnnnnnnnnnnnnnnnnnnnnnnnnnnnnnnnnnnnnnnnnnnnnnnnnnnnnnnnnnnnnnnnnnnnnnnnnnnnnnnnnnnnnnnnnnnnnnnnnnnnnnnnnnnnnnnnnnnnnnnnnnnnnnnnnnnnnnnnnnnnnnnnnnnnnnnnnnnnnnnnnnnnnnnnnnnnnnnnnnnnnnnnnnnnnnnnnnnnnnnnnnnnnnnnnnnnnnnnnnnnnnnnnnnnnnnnnnnnnnnnnnnnnnnnnnnnnnnnnnnnnnnnnnnnnnnnnnnnnnnnnnnnnnnnnnnnnnnnnnnnnnnnnnnnnnnnnnnnnnnnnnnnnnnnnnnnnnnnnnnnnnnnnnnnnnnnnnnnnnnnnnnnnnnnnnnnnnnnnnnnnnnnnnnnnnnnnnnnnnnnnnnnnnnnnnnnnnnnnnnnnnnnnnnnnnnnnnnnnnnnnnnnnnnnnnnnnnnnnnnnnnnnnnnnnnnnnnnnnnnnnnnnnnnnnnnnnnnnnnnnnnnnnnnnnnnnnnnnnnnnnnnnnnnnnnnnnnnnnnnnnnnnnnnnnnnnnnnnnnnnnnnnnnnnnnnnnnnnnnnnnnnnnnnnnnnnnnnnnnnnnnnnnnnnnnnnnnnnnnnnnnnnnnnnnnnnnnnnnnnnnnnnnnnnnnnnnnnnnnnnnnnnnnnnnnnnnnnnnnnnnnnnnnnnnnnnnnnnnnnnnnnnnnnnnnnnnnnnnnnnnnnnnnnnnnnnnnnnnnnnnnnnnnnnnnnnnnnnnnnnnnnnnnnnnnnnnnnnnnnnnnnnnnnnnnnnnnnnnnnnnnnnnnnnnnnnnnnnnnnnnnnnnnnnnnnnnnnnnnnnnnnnnnnnnnnnnnnnnnnnnnnnnnnnnnnnnnnnnnnnnnnnnnnnnnnnnnnnnnnnnnnnnnnnnnnnnnnnnnnnnnnnnnnnnnnnnnnnnnnnnnnnnnnnnnnnnnnnnnnnnnnnnnnnnnnnnnnnnnnnnnnnnnnnnnnnnnnnnnnnnnnnnnnnnnnnnnnnnnnnnnnnnnnnnnnnnnnnnnnnnnnnnnnnnnnnnnnnnnnnnnnnnnnnnnnnnnnnnnnnnnnnnnnnnnnnnnnnnnnnnnnnnnnnnnnnnnnnnnnnnnnnnnnnnnnnnnnnnnnnnnnnnnnnnnnnnnnnnnnnnnnnnnnnnnnnnnnnnnnnnnnnnnnnnnnnnnnnnnnnnnnnnnnnnnnnnnnnnnnnnnnnnnnnnnnnnnnnnnnnnnnnnnnnnnnnnnnnnnnnnnnnnnnnnnnnnnnnnnnnnnnnnnnnnnnnnnnnnnnnnnnnnnnnnnnnnnnnnnnnnnnnnnnnnnnnnnnnnnnnnnnnnnnnnnnnnnnnnnnnnnnnnnnnnnnnnnnnnnnnnnnnnnnnnnnnnnnnnnnnnnnnnnnnnnnnnnnnnnnnnnnnnnnnnnnnnnnnnnnnnnnnnnnnnnnnnnnnnnnnnnnnnnnnnnnnnnnnnnnnnnnnnnnnnnnnnnnnnnnnnnnnnnnnnnnnnnnnnnnnnnnnnnnnnnnnnnnnnnnnnnnnnnnnnnnnnnnnnnnnnnnnnnnnnnnnnnnnnnnnnnnnnnnnnnnnnnnnnnnnnnnnnnnnnnnnnnnnnnnnnnnnnnnnnnnnnnnnnnnnnnnnnnnnnnnnnnnnnnnnnnnnnnnnnnnnnnnnnnnnnnnnnnnnnnnnnnnnnnnnnnnnnnnnnnnnnnnnnnnnnnnnnnnnnnnnnnnnnnnnnnnnnnnnnnnnnnnnnnnnnnnnnnnnnnnnnnnnnnnnnnnnnnnnnnnnnnnnnnnnnnnnnnnnnnnnnnnnnnnnnnnnnnnnnnnnnnnnnnnnnnnnnnnnnnnnnnnnnnnnnnnnnnnnnnnnnnnnnnnnnnnnnnnnnnnnnnnnnnnnnnnnnnnnnnnnnnnnnnnnnnnnnnnnnnnnnnnnnnnnnnnnnnnnnnnnnnnnnnnnnnnnnnnnnnnnnnnnnnnnnnnnnnnnnnnnnnnnnnnnnnnnnnnnnnnnnnnnnnnnnnnnnnnnnnnnnnnnnnnnnnnnnnnnnnnnnnnnnnnnnnnnnnnnnnnnnnnnnnnnnnnnnnnnnnnnnnnnnnnnnnnnnnnnnnnnnnnnnnnnnnnnnnnnnnnnnnnnnnnnnnnnnnnnnnnnnnnnnnnnnnnnnnnnnnnnnnnnnnnnnnnnnnnnnnnnnnnnnnnnnnnnnnnnnnnnnnnnnnnnnnnnnnnnnnnnnnnnnnnnnnnnnnnnnnnnnnnnnnnnnnnnnnnnnnnnnnnnnnnnnnnnnnnnnnnnnnnnnnnnnnnnnnnnnnnnnnnnnnnnnnnnnnnnnnnnnnnnnnnnnnnnnnnnnnnnnnnnnnnnnnnnnnnnnnnnnnnnnnnnnnnnnnnnnnnnnnnnnnnnnnnnnnnnnnnnnnnnnnnnnnnnnnnnnnnnnnnnnnnnnnnnnnnnnnnnnnnnnnnnnnnnnnnnnnnnnnnnnnnnnnnnnnnnnnnnnnnnnnnnnnnnnnnnnnnnnnnnnnnnnnnnnnnnnnnnnnnnnnnnnnnnnnnnnnnnnnnnnnnnnnnnnnnnnnnnnnnnnnnnnnnnnnnnnnnnnnnnnnnnnnnnnnnnnnnnnnnnnnnnnnnnnnnnnnnnnnnnnnnnnnnnnnnnnnnnnnnnnnnnnnnnnnnnnnnnnnnnnnnnnnnnnnnnnnnnnnnnnnnnnnnnnnnnnnnnnnnnnnnnnnnnnnnnnnnnnnnnnnnnnnnnnnnnnnnnnnnnnnnnnnnnnnnnnnnnnnnnnnnnnnnnnnnnnnnnnnnnnnnnnnnnnnnnnnnnnnnnnnnnnnnnnnnnnnnnnnnnnnnnnnnnnnnnnnnnnnnnnnnnnnnnnnnnnnnnnnnnnnnnnnnnnnnnnnnnnnnnnnnnnnnnnnnnnnnnnnnnnnnnnnnnnnnnnnnnnnnnnnnnnnnnnnnnnnnnnnnnnnnnnnnnnnnnnnnnnnnnnnnnnnnnnnnnnnnnnnnnnnnnnnnnnnnnnnnnnnnnnnnnnnnnnnnnnnnnnnnnnnnnnnnnnnnnnnnnnnnnnnnnnnnnnnnnnnnnnnnnnnnnnnnnnnnnnnnnnnnnnnnnnnnnnnnnnnnnnnnnnnnnnnnnnnnnnnnnnnnnnnnnnnnnnnnnnnnnnnnnnnnnnnnnnnnnnnnnnnnnnnnnnnnnnnnnnnnnnnnnnnnnnnnnnnnnnnnnnnnnnnnnnnnnnnnnnnnnnnnnnnnnnnnnnnnnnnnnnnnnnnnnnnnnnnnnnnnnnnnnnnnnnnnnnnnnnnnnnnnnnnnnnnnnnnnnnnnnnnnnnnnnnnnnnnnnnnnnnnnnnnnnnnnnnnnnnnnnnnnnnnnnnnnnnnnnnnnnnnnnnnnnnnnnnnnnnnnnnnnnnnnnnnnnnnnnnnnnnnnnnnnnnnnnnnnnnnnnnnnnnnnnnnnnnnnnnnnnnnnnnnnnnnnnnnnnnnnnnnnnnnnnnnnnnnnnnnnnnnnnnnnnnnnnnnnnnnnnnnnnnnnnnnnnnnnnnnnnnnnnnnnnnnnnnnnnnnnnnnnnnnnnnnnnnnnnnnnnnnnnnnnnnnnnnnnnnnnnnnnnnnnnnnnnnnnnnnnnnnnnnnnnnnnnnnnnnnnnnnnnnnnnnnnnnnnnnnnnnnnnnnnnnnnnnnnnnnnnnnnnnnnnnnnnnnnnnnnnnnnnnnnnnnnnnnnnnnnnnnnnnnnnnnnnnnnnnnnnnnnnnnnnnnnnnnnnnnnnnnnnnnnnnnnnnnnnnnnnnnnnnnnnnnnnnnnnnnnnnnnnnnnnnnnnnnnnnnnnnnnnnnnnnnnnnnnnnnnnnnnnnnnnnnnnnnnnnnnnnnnnnnnnnnnnnnnnnnnnnnnnnnnnnnnnnnnnnnnnnnnnnnnnnnnnnnnnnnnnnnnnnnnnnnnnnnnnnnnnnnnnnnnnnnnnnnnnnnnnnnnnnnnnnnnnnnnnnnnnnnnnnnnnnnnnnnnnnnnnnnnnnnnnnnnnnnnnnnnnnnnnnnnnnnnnnnnnnnnnnnnnnnnnnnnnnnnnnnnnnnnnnnnnnnnnnnnnnnnnnnnnnnnnnnnnnnnnnnnnnnnnnnnnnnnnnnnnnnnnnnnnnnnnnnnnnnnnnnnnnnnnnnnnnnnnnnnnnnnnnnnnnnnnnnnnnnnnnnnnnnnnnnnnnnnnnnnnnnnnnnnnnnnnnnnnnnnnnnnnnnnnnnnnnnnnnnnnnnnnnnnnnnnnnnnnnnnnnnnnnnnnnnnnnnnnnnnnnnnnnnnnnnnnnnnnnnnnnnnnnnnnnnnnnnnnnnnnnnnnnnnnnnnnnnnnnnnnnnnnnnnnnnnnnnnnnnnnnnnnnnnnnnnnnnnnnnnnnnnnnnnnnnnnnnnnnnnnnnnnnnnnnnnnnnnnnnnnnnnnnnnnnnnnnnnnnnnnnnnnnnnnnnnnnnnnnnnnnnnnnnnnnnnnnnnnnnnnnnnnnnnnnnnnnnnnnnnnnnnnnnnnnnnnnnnnnnnnnnnnnnnnnnnnnnnnnnnnnnnnnnnnnnnnnnnnnnnnnnnnnnnnnnnnnnnnnnnnnnnnnnnnnnnnnnnnnnnnnnnnnnnnnnnnnnnnnnnnnnnnnnnnnnnnnnnnnnnnnnnnnnnnnnnnnnnnnnnnnnnnnnnnnnnnnnnnnnnnnnnnnnnnnnnnnnnnnnnnnnnnnnnnnnnnnnnnnnnnnnnnnnnnnnnnnnnnnnnnnnnnnnnnnnnnnnnnnnnnnnnnnnnnnnnnnnnnnnnnnnnnnnnnnnnnnnnnnnnnnnnnnnnnnnnnnnnnnnnnnnnnnnnnnnnnnnnnnnnnnnnnnnnnnnnnnnnnnnnnnnnnnnnnnnnnnnnnnnnnnnnnnnnnnnnnnnnnnnnnnnnnnnnnnnnnnnnnnnnnnnnnnnnnnnnnnnnnnnnnnnnnnnnnnnnnnnnnnnnnnnnnnnnnnnnnnnnnnnnnnnnnnnnnnnnnnnnnnnnnnnnnnnnnnnnnnnnnnnnnnnnnnnnnnnnnnnnnnnnnnnnnnnnnnnnnnnnnnnnnnnnnnnnnnnnnnnnnnnnnnnnnnnnnnnnnnnnnnnnnnnnnnnnnnnnnnnnnnnnnnnnnnnnnnnnnnnnnnnnnnnnnnnnnnnnnnnnnnnnnnnnnnnnnnnnnnnnnnnnnnnnnnnnnnnnnnnnnnnnnnnnnnnnnnnnnnnnnnnnnnnnnnnnnnnnnnnnnnnnnnnnnnnnnnnnnnnnnnnnnnnnnnnnnnnnnnnnnnnnnnnnnnnnnnnnnnnnnnnnnnnnnnnnnnnnnnnnnnnnnnnnnnnnnnnnnnnnnnnnnnnnnnnnnnnnnnnnnnnnnnnnnnnnnnnnnnnnnnnnnnnnnnnnnnnnnnnnnnnnnnnnnnnnnnnnnnnnnnnnnnnnnnnnnnnnnnnnnnnnnnnnnnnnnnnnnnnnnnnnnnnnnnnnnnnnnnnnnnnnnnnnnnnnnnnnnnnnnnnnnnnnnnnnnnnnnnnnnnnnnnnnnnnnnnnnnnnnnnnnnnnnnnnnnnnnnnnnnnnnnnnnnnnnnnnnnnnnnnnnnnnnnnnnnnnnnnnnnnnnnnnnnnnnnnnnnnnnnnnnnnnnnnnnnnnnnnnnnnnnnnnnnnnnnnnnnnnnnnnnnnnnnnnnnnnnnnnnnnnnnnnnnnnnnnnnnnnnnnnnnnnnnnnnnnnnnnnnnnnnnnnnnnnnnnnnnnnnnnnnnnnnnnnnnnnnnnnnnnnnnnnnnnnnnnnnnnnnnnnnnnnnnnnnnnnnnnnnnnnnnnnnnnnnnnnnnnnnnnnnnnnnnnnnnnnnnnnnnnnnnnnnnnnnnnnnnnnnnnnnnnnnnnnnnnnnnnnnnnnnnnnnnnnnnnnnnnnnnnnnnnnnnnnnnnnnnnnnnnnnnnnnnnnnnnnnnnnnnnnnnnnnnnnnnnnnnnnnnnnnnnnnnnnnnnnnnnnnnnnnnnnnnnnnnnnnnnnnnnnnnnnnnnnnnnnnnnnnnnnnnnnnnnnnnnnnnnnnnnnnnnnnnnnnnnnnnnnnnnnnnnnnnnnnnnnnnnnnnnnnnnnnnnnnnnnnnnnnnnnnnnnnnnnnnnnnnnnnnnnnnnnnnnnnnnnnnnnnnnnnnnnnnnnnnnnnnnnnnnnnnnnnnnnnnnnnnnnnnnnnnnnnnnnnnnnnnnnnnnnnnnnnnnnnnnnnnnnnnnnnnnnnnnnnnnnnnnnnnnnnnnnnnnnnnnnnnnnnnnnnnnnnnnnnnnnnnnnnnnnnnnnnnnnnnnnnnnnnnnnnnnnnnnnnnnnnnnnnnnnnnnnnnnnnnnnnnnnnnnnnnnnnnnnnnnnnnnnnnnnnnnnnnnnnnnnnnnnnnnnnnnnnnnnnnnnnnnnnnnnnnnnnnnnnnnnnnnnnnnnnnnnnnnnnnnnnnnnnnnnnnnnnnnnnnnnnnnnnnnnnnnnnnnnnnnnnnnnnnnnnnnnnnnnnnnnnnnnnnnnnnnnnnnnnnnnnnnnnnnnnnnnnnnnnnnnnnnnnnnnnnnnnnnnnnnnnnnnnnnnnnnnnnnnnnnnnnnnnnnnnnnnnnnnnnnnnnnnnnnnnnnnnnnnnnnnnnnnnnnnnnnnnnnnnnnnnnnnnnnnnnnnnnnnnnnnnnnnnnnnnnnnnnnnnnnnnnnnnnnnnnnnnnnnnnnnnnnnnnnnnnnnnnnnnnnnnnnnnnnnnnnnnnnnnnnnnnnnnnnnnnnnnnnnnnnnnnnnnnnnnnnnnnnnnnnnnnnnnnnnnnnnnnnnnnnnnnnnnnnnnnnnnnnnnnnnnnnnnnnnnnnnnnnnnnnnnnnnnnnnnnnnnnnnnnnnnnnnnnnnnnnnnnnnnnnnnnnnnnnnnnnnnnnnnnnnnnnnnnnnnnnnnnnnnnnnnnnnnnnnnnnnnnnnnnnnnnnnnnnnnnnnnnnnnnnnnnnnnnnnnnnnnnnnnnnnnnnnnnnnnnnnnnnnnnnnnnnnnnnnnnnnnnnnnnnnnnnnnnnnnnnnnnnnnnnnnnnnnnnnnnnnnnnnnnnnnnnnnnnnnnnnnnnnnnnnnnnnnnnnnnnnnnnnnnnnnnnnnnnnnnnnnnnnnnnnnnnnnnnnnnnnnnnnnnnnnnnnnnnnnnnnnnnnnnnnnnnnnnnnnnnnnnnnnnnnnnnnnnnnnnnnnnnnnnnnnnnnnnnnnnnnnnnnnnnnnnnnnnnnnnnnnnnnnnnnnnnnnnnnnnnnnnnnnnnnnnnnnnnnnnnnnnnnnnnnnnnnnnnnnnnnnnnnnnnnnnnnnnnnnnnnnnnnnnnnnnnnnnnnnnnnnnnnnnnnnnnnnnnnnnnnnnnnnnnnnnnnnnnnnnnnnnnnnnnnnnnnnnnnnnnnnnnnnnnnnnnnnnnnnnnnnnnnnnnnnnnnnnnnnnnnnnnnnnnnnnnnnnnnnnnnnnnnnnnnnnnnnnnnnnnnnnnnnnnnnnnnnnnnnnnnnnnnnnnnnnnnnnnnnnnnnnnnnnnnnnnnnnnnnnnnnnnnnnnnnnnnnnnnnnnnnnnnnnnnnnnnnnnnnnnnnnnnnnnnnnnnnnnnnnnnnnnnnnnnnnnnnnnnnnnnnnnnnnnnnnnnnnnnnnnnnnnnnnnnnnnnnnnnnnnnnnnnnnnnnnnnnnnnnnnnnnnnnnnnnnnnnnnnnnnnnnnnnnnnnnnnnnnnnnnnnnnnnnnnnnnnnnnnnnnnnnnnnnnnnnnnnnnnnnnnnnnnnnnnnnnnnnnnnnnnnnnnnnnnnnnnnnnnnnnnnnnnnnnnnnnnnnnnnnnnnnnnnnnnnnnnnnnnnnnnnnnnnnnnnnnnnnnnnnnnnnnnnnnnnnnnnnnnnnnnnnnnnnnnnnnnnnnnnnnnnnnnnnnnnnnnnnnnnnnnnnnnnnnnnnnnnnnnnnnnnnnnnnnnnnnnnnnnnnnnnnnnnnnnnnnnnnnnnnnnnnnnnnnnnnnnnnnnnnnnnnnnnnnnnnnnnnnnnnnnnnnnnnnnnnnnnnnnnnnnnnnnnnnnnnnnnnnnnnnnnnnnnnnnnnnnnnnnnnnnnnnnnnnnnnnnnnnnnnnnnnnnnnnnnnnnnnnnnnnnnnnnnnnnnnnnnnnnnnnnnnnnnnnnnnnnnnnnnnnnnnnnnnnnnnnnnnnnnnnnnnnnnnnnnnnnnnnnnnnnnnnnnnnnnnnnnnnnnnnnnnnnnnnnnnnnnnnnnnnnnnnnnnnnnnnnnnnnnnnnnnnnnnnnnnnnnnnnnnnnnnnnnnnnnnnnnnnnnnnnnnnnnnnnnnnnnnnnnnnnnnnnnnnnnnnnnnnnnnnnnnnnnnnnnnnnnnnnnnnnnnnnnnnnnnnnnnnnnnnnnnnnnnnnnnnnnnnnnnnnnnnnnnnnnnnnnnnnnnnnnnnnnnnnnnnnnnnnnnnnnnnnnnnnnnnnnnnnnnnnnnnnnnnnnnnnnnnnnnnnnnnnnnnnnnnnnnnnnnnnnnnnnnnnnnnnnnnnnnnnnnnnnnnnnnnnnnnnnnnnnnnnnnnnnnnnnnnnnnnnnnnnnnnnnnnnnnnnnnnnnnnnnnnnnnnnnnnnnnnnnnnnnnnnnnnnnnnnnnnnnnnnnnnnnnnnnnnnnnnnnnnnnnnnnnnnnnnnnnnnnnnnnnnnnnnnnnnnnnnnnnnnnnnnnnnnnnnnnnnnnnnnnnnnnnnnnnnnnnnnnnnnnnnnnnnnnnnnnnnnnnnnnnnnnnnnnnnnnnnnnnnnnnnnnnnnnnnnnnnnnnnnnnnnnnnnnnnnnnnnnnnnnnnnnnnnnnnnnnnnnnnnnnnnnnnnnnnnnnnnnnnnnnnnnnnnnnnnnnnnnnnnnnnnnnnnnnnnnnnnnnnnnnnnnnnnnnnnnnnnnnnnnnnnnnnnnnnnnnnnnnnnnnnnnnnnnnnnnnnnnnnnnnnnnnnnnnnnnnnnnnnnnnnnnnnnnnnnnnnnnnnnnnnnnnnnnnnnnnnnnnnnnnnnnnnnnnnnnnnnnnnnnnnnnnnnnnnnnnnnnnnnnnnnnnnnnnnnnnnnnnnnnnnnnnnnnnnnnnnnnnnnnnnnnnnnnnnnnnnnnnnnnnnnnnnnnnnnnnnnnnnnnnnnnnnnnnnnnnnnnnnnnnnnnnnnnnnnnnnnnnnnnnnnnnnnnnnnnnnnnnnnnnnnnnnnnnnnnnnnnnnnnnnnnnnnnnnnnnnnnnnnnnnnnnnnnnnnnnnnnnnnnnnnnnnnnnnnnnnnnnnnnnnnnnnnnnnnnnnnnnnnnnnnnnnnnnnnnnnnnnnnnnnnnnnnnnnnnnnnnnnnnnnnnnnnnnnnnnnnnnnnnnnnnnnnnnnnnnnnnnnnnnnnnnnnnnnnnnnnnnnnnnnnnnnnnnnnnnnnnnnnnnnnnnnnnnnnnnnnnnnnnnnnnnnnnnnnnnnnnnnnnnnnnnnnnnnnnnnnnnnnnnnnnnnnnnnnnnnnnnnnnnnnnnnnnnnnnnnnnnnnnnnnnnnnnnnnnnnnnnnnnnnnnnnnnnnnnnnnnnnnnnnnnnnnnnnnnnnnnnnnnnnnnnnnnnnnnnnnnnnnnnnnnnnnnnnnnnnnnnnnnnnnnnnnnnnnnnnnnnnnnnnnnnnnnnnnnnnnnnnnnnnnnnnnnnnnnnnnnnnnnnnnnnnnnnnnnnnnnnnnnnnnnnnnnnnnnnnnnnnnnnnnnnnnnnnnnnnnnnnnnnnnnnnnnnnnnnnnnnnnnnnnnnnnnnnnnnnnnnnnnnnnnnnnnnnnnnnnnnnnnnnnnnnnnnnnnnnnnnnnnnnnnnnnnnnnnnnnnnnnnnnnnnnnnnnnnnnnnnnnnnnnnnnnnnnnnnnnnnnnnnnnnnnnnnnnnnnnnnnnnnnnnnnnnnnnnnnnnnnnnnnnnnnnnnnnnnnnnnnnnnnnnnnnnnnnnnnnnnnnnnnnnnnnnnnnnnnnnnnnnnnnnnnnnnnnnnnnnnnnnnnnnnnnnnnnnnnnnnnnnnnnnnnnnnnnnnnnnnnnnnnnnnnnnnnnnnnnnnnnnnnnnnnnnnnnnnnnnnnnnnnnnnnnnnnnnnnnnnnnnnnnnnnnnnnnnnnnnnnnnnnnnnnnnnnnnnnnnnnnnnnnnnnnnnnnnnnnnnnnnnnnnnnnnnnnnnnnnnnnnnnnnnnnnnnnnnnnnnnnnnnnnnnnnnnnnnnnnnnnnnnnnnnnnnnnnnnnnnnnnnnnnnnnnnnnnnnnnnnnnnnnnnnnnnnnnnnnnnnnnnnnnnnnnnnnnnnnnnnnnnnnnnnnnnnnnnnnnnnnnnnnnnnnnnnnnnnnnnnnnnnnnnnnnnnnnnnnnnnnnnnnnnnnnnnnnnnnnnnnnnnnnnnnnnnnnnnnnnnnnnnnnnnnnnnnnnnnnnnnnnnnnnnnnnnnnnnnnnnnnnnnnnnnnnnnnnnnnnnnnnnnnnnnnnnnnnnnnnnnnnnnnnnnnnnnnnnnnnnnnnnnnnnnnnnnnnnnnnnnnnnnnnnnnnnnnnnnnnnnnnnnnnnnnnnnnnnnnnnnnnnnnnnnnnnnnnnnnnnnnnnnnnnnnnnnnnnnnnnnnnnnnnnnnnnnnnnnnnnnnnnnnnnnnnnnnnnnnnnnnnnnnnnnnnnnnnnnnnnnnnnnnnnnnnnnnnnnnnnnnnnnnnnnnnnnnnnnnnnnnnnnnnnnnnnnnnnnnnnnnnnnnnnnnnnnnnnnnnnnnnnnnnnnnnnnnnnnnnnnnnnnnnnnnnnnnnnnnnnnnnnnnnnnnnnnnnnnnnnnnnnnnnnnnnnnnnnnnnnnnnnnnnnnnnnnnnnnnnnnnnnnnnnnnnnnnnnnnnnnnnnnnnnnnnnnnnnnnnnnnnnnnnnnnnnnnnnnnnnnnnnnnnnnnnnnnnnnnnnnnnnnnnnnnnnnnnnnnnnnnnnnnnnnnnnnnnnnnnnnnnnnnnnnnnnnnnnnnnnnnnnnnnnnnnnnnnnnnnnnnnnnnnnnnnnnnnnnnnnnnnnnnnnnnnnnnnnnnnnnnnnnnnnnnnnnnnnnnnnnnnnnnnnnnnnnnnnnnnnnnnnnnnnnnnnnnnnnnnnnnnnnnnnnnnnnnnnnnnnnnnnnnnnnnnnnnnnnnnnnnnnnnnnnnnnnnnnnnnnnnnnnnnnnnnnnnnnnnnnnnnnnnnnnnnnnnnnnnnnnnnnnnnnnnnnnnnnnnnnnnnnnnnnnnnnnnnnnnnnnnnnnnnnnnnnnnnnnnnnnnnnnnnnnnnnnnnnnnnnnnnnnnnnnnnnnnnnnnnnnnnnnnnnnnnnnnnnnnnnnnnnnnnnnnnnnnnnnnnnnnnnnnnnnnnnnnnnnnnnnnnnnnnnnnnnnnnnnnnnnnnnnnnnnnnnnnnnnnnnnnnnnnnnnnnnnnnnnnnnnnnnnnnnnnnnnnnnnnnnnnnnnnnnnnnnnnnnnnnnnnnnnnnnnnnnnnnnnnnnnnnnnnnnnnnnnnnnnnnnnnnnnnnnnnnnnnnnnnnnnnnnnnnnnnnnnnnnnnnnnnnnnnnnnnnnnnnnnnnnnnnnnnnnnnnnnnnnnnnnnnnnnnnnnnnnnnnnnnnnnnnnnnnnnnnnnnnnnnnnnnnnnnnnnnnnnnnnnnnnnnnnnnnnnnnnnnnnnnnnnnnnnnnnnnnnnnnnnnnnnnnnnnnnnnnnnnnnnnnnnnnnnnnnnnnnnnnnnnnnnnnnnnnnnnnnnnnnnnnnnnnnnnnnnnnnnnnnnnnnnnnnnnnnnnnnnnnnnnnnnnnnnnnnnnnnnnnnnnnnnnnnnnnnnnnnnnnnnnnnnnnnnnnnnnnnnnnnnnnnnnnnnnnnnnnnnnnnnnnnnnnnnnnnnnnnnnnnnnnnnnnnnnnnnnnnnnnnnnnnnnnnnnnnnnnnnnnnnnnnnnnnnnnnnnnnnnnnnnnnnnnnnnnnnnnnnnnnnnnnnnnnnnnnnnnnnnnnnnnnnnnnnnnnnnnnnnnnnnnnnnnnnnnnnnnnnnnnnnnnnnnnnnnnnnnnnnnnnnnnnnnnnnnnnnnnnnnnnnnnnnnnnnnnnnnnnnnnnnnnnnnnnnnnnnnnnnnnnnnnnnnnnnnnnnnnnnnnnnnnnnnnnnnnnnnnnnnnnnnnnnnnnnnnnnnnnnnnnnnnnnnnnnnnnnnnnnnnnnnnnnnnnnnnnnnnnnnnnnnnnnnnnnnnnnnnnnnnnnnnnnnnnnnnnnnnnnnnnnnnnnnnnnnnnnnnnnnnnnnnnnnnnnnnnnnnnnnnnnnnnnnnnnnnnnnnnnnnnnnnnnnnnnnnnnnnnnnnnnnnnnnnnnnnnnnnnnnnnnnnnnnnnnnnnnnnnnnnnnnnnnnnnnnnnnnnnnnnnnnnnnnnnnnnnnnnnnnnnnnnnnnnnnnnnnnnnnnnnnnnnnnnnnnnnnnnnnnnnnnnnnnnnnnnnnnnnnnnnnnnnnnnnnnnnnnnnnnnnnnnnnnnnnnnnnnnnnnnnnnnnnnnnnnnnnnnnnnnnnnnnnnnnnnnnnnnnnnnnnnnnnnnnnnnnnnnnnnnnnnnnnnnnnnnnnnnnnnnnnnnnnnnnnnnnnnnnnnnnnnnnnnnnnnnnnnnnnnnnnnnnnnnnnnnnnnnnnnnnnnnnnnnnnnnnnnnnnnnnnnnnnnnnnnnnnnnnnnnnnnnnnnnnnnnnnnnnnnnnnnnnnnnnnnnnnnnnnnnnnnnnnnnnnnnnnnnnnnnnnnnnnnnnnnnnnnnnnnnnnnnnnnnnnnnnnnnnnnnnnnnnnnnnnnnnnnnnnnnnnnnnnnnnnnnnnnnnnnnnnnnnnnnnnnnnnnnnnnnnnnnnnnnnnnnnnnnnnnnnnnnnnnnnnnnnnnnnnnnnnnnnnnnnnnnnnnnnnnnnnnnnnnnnnnnnnnnnnnnnnnnnnnnnnnnnnnnnnnnnnnnnnnnnnnnnnnnnnnnnnnnnnnnnnnnnnnnnnnnnnnnnnnnnnnnnnnnnnnnnnnnnnnnnnnnnnnnnnnnnnnnnnnnnnnnnnnnnnnnnnnnnnnnnnnnnnnnnnnnnnnnnnnnnnnnnnnnnnnnnnnnnnnnnnnnnnnnnnnnnnnnnnnnnnnnnnnnnnnnnnnnnnnnnnnnnnnnnnnnnnnnnnnnnnnnnnnnnnnnnnnnnnnnnnnnnnnnnnnnnnnnnnnnnnnnnnnnnnnnnnnnnnnnnnnnnnnnnnnnnnnnnnnnnnnnnnnnnnnnnnnnnnnnnnnnnnnnnnnnnnnnnnnnnnnnnnnnnnnnnnnnnnnnnnnnnnnnnnnnnnnnnnnnnnnnnnnnnnnnnnnnnnnnnnnnnnnnnnnnnnnnnnnnnnnnnnnnnnnnnnnnnnnnnnnnnnnnnnnnnnnnnnnnnnnnnnnnnnnnnnnnnnnnnnnnnnnnnnnnnnnnnnnnnnnnnnnnnnnnnnnnnnnnnnnnnnnnnnnnnnnnnnnnnnnnnnnnnnnnnnnnnnnnnnnnnnnnnnnnnnnnnnnnnnnnnnnnnnnnnnnnnnnnnnnnnnnnnnnnnnnnnnnnnnnnnnnnnnnnnnnnnnnnnnnnnnnnnnnnnnnnnnnnnnnnnnnnnnnnnnnnnnnnnnnnnnnnnnnnnnnnnnnnnnnnnnnnnnnnnnnnnnnnnnnnnnnnnnnnnnnnnnnnnnnnnnnnnnnnnnnnnnnnnnnnnnnnnnnnnnnnnnnnnnnnnnnnnnnnnnnnnnnnnnnnnnnnnnnnnnnnnnnnnnnnnnnnnnnnnnnnnnnnnnnnnnnnnnnnnnnnnnnnnnnnnnnnnnnnnnnnnnnnnnnnnnnnnnnnnnnnnnnnnnnnnnnnnnnnnnnnnnnnnnnnnnnnnnnnnnnnnnnnnnnnnnnnnnnnnnnnnnnnnnnnnnnnnnnnnnnnnnnnnnnnnnnnnnnnnnnnnnnnnnnnnnnnnnnnnnnnnnnnnnnnnnnnnnnnnnnnnnnnnnnnnnnnnnnnnnnnnnnnnnnnnnnnnnnnnnnnnnnnnnnnnnnnnnnnnnnnnnnnnnnnnnnnnnnnnnnnnnnnnnnnnnnnnnnnnnnnnnnnnnnnnnnnnnnnnnnnnnnnnnnnnnnnnnnnnnnnnnnnnnnnnnnnnnnnnnnnnnnnnnnnnnnnnnnnnnnnnnnnnnnnnnnnnnnnnnnnnnnnnnnnnnnnnnnnnnnnnnnnnnnnnnnnnnnnnnnnnnnnnnnnnnnnnnnnnnnnnnnnnnnnnnnnnnnnnnnnnnnnnnnnnnnnnnnnnnnnnnnnnnnnnnnnnnnnnnnnnnnnnnnnnnnnnnnnnnnnnnnnnnnnnnnnnnnnnnnnnnnnnnnnnnnnnnnnnnnnnnnnnnnnnnnnnnnnnnnnnnnnnnnnnnnnnnnnnnnnnnnnnnnnnnnnnnnnnnnnnnnnnnnnnnnnnnnnnnnnnnnnnnnnnnnnnnnnnnnnnnnnnnnnnnnnnnnnnnnnnnnnnnnnnnnnnnnnnnnnnnnnnnnnnnnnnnnnnnnnnnnnnnnnnnnnnnnnnnnnnnnnnnnnnnnnnnnnnnnnnnnnnnnnnnnnnnnnnnnnnnnnnnnnnnnnnnnnnnnnnnnnnnnnnnnnnnnnnnnnnnnnnnnnnnnnnnnnnnnnnnnnnnnnnnnnnnnnnnnnnnnnnnnnnnnnnnnnnnnnnnnnnnnnnnnnnnnnnnnnnnnnnnnnnnnnnnnnnnnnnnnnnnnnnnnnnnnnnnnnnnnnnnnnnnnnnnnnnnnnnnnnnnnnnnnnnnnnnnnnnnnnnnnnnnnnnnnnnnnnnnnnnnnnnnnnnnnnnnnnnnnnnnnnnnnnnnnnnnnnnnnnnnnnnnnnnnnnnnnnnnnnnnnnnnnnnnnnnnnnnnnnnnnnnnnnnnnnnnnnnnnnnnnnnnnnnnnnnnnnnnnnnnnnnnnnnnnnnnnnnnnnnnnnnnnnnnnnnnnnnnnnnnnnnnnnnnnnnnnnnnnnnnnnnnnnnnnnnnnnnnnnnnnnnnnnnnnnnnnnnnnnnnnnnnnnnnnnnnnnnnnnnnnnnnnnnnnnnnnnnnnnnnnnnnnnnnnnnnnnnnnnnnnnnnnnnnnnnnnnnnnnnnnnnnnnnnnnnnnnnnnnnnnnnnnnnnnnnnnnnnnnnnnnnnnnnnnnnnnnnnnnnnnnnnnnnnnnnnnnnnnnnnnnnnnnnnnnnnnnnnnnnnnnnnnnnnnnnnnnnnnnnnnnnnnnnnnnnnnnnnnnnnnnnnnnnnnnnnnnnnnnnnnnnnnnnnnnnnnnnnnnnnnnnnnnnnnnnnnnnnnnnnnnnnnnnnnnnnnnnnnnnnnnnnnnnnnnnnnnnnnnnnnnnnnnnnnnnnnnnnnnnnnnnnnnnnnnnnnnnnnnnnnnnnnnnnnnnnnnnnnnnnnnnnnnnnnnnnnnnnnnnnnnnnnnnnnnnnnnnnnnnnnnnnnnnnnnnnnnnnnnnnnnnnnnnnnnnnnnnnnnnnnnnnnnnnnnnnnnnnnnnnnnnnnnnnnnnnnnnnnnnnnnnnnnnnnnnnnnnnnnnnnnnnnnnnnnnnnnnnnnnnnnnnnnnnnnnnnnnnnnnnnnnnnnnnnnnnnnnnnnnnnnnnnnnnnnnnnnnnnnnnnnnnnnnnnnnnnnnnnnnnnnnnnnnnnnnnnnnnnnnnnnnnnnnnnnnnnnnnnnnnnnnnnnnnnnnnnnnnnnnnnnnnnnnnnnnnnnnnnnnnnnnnnnnnnnnnnnnnnnnnnnnnnnnnnnnnnnnnnnnnnnnnnnnnnnnnnnnnnnnnnnnnnnnnnnnnnnnnnnnnnnnnnnnnnnnnnnnnnnnnnnnnnnnnnnnnnnnnnnnnnnnnnnnnnnnnnnnnnnnnnnnnnnnnnnnnnnnnnnnnnnnnnnnnnnnnnnnnnnnnnnnnnnnnnnnnnnnnnnnnnnnnnnnnnnnnnnnnnnnnnnnnnnnnnnnnnnnnnnnnnnnnnnnnnnnnnnnnnnnnnnnnnnnnnnnnnnnnnnnnnnnnnnnnnnnnnnnnnnnnnnnnnnnnnnnnnnnnnnnnnnnnnnnnnnnnnnnnnnnnnnnnnnnnnnnnnnnnnnnnnnnnnnnnnnnnnnnnnnnnnnnnnnnnnnnnnnnnnnnnnnnnnnnnnnnnnnnnnnnnnnnnnnnnnnnnnnnnnnnnnnnnnnnnnnnnnnnnnnnnnnnnnnnnnnnnnnnnnnnnnnnnnnnnnnnnnnnnnnnnnnnnnnnnnnnnnnnnnnnnnnnnnnnnnnnnnnnnnnnnnnnnnnnnnnnnnnnnnnnnnnnnnnnnnnnnnnnnnnnnnnnnnnnnnnnnnnnnnnnnnnnnnnnnnnnnnnnnnnnnnnnnnnnnnnnnnnnnnnnnnnnnnnnnnnnnnnnnnnnnnnnnnnnnnnnnnnnnnnnnnnnnnnnnnnnnnnnnnnnnnnnnnnnnnnnnnnnnnnnnnnnnnnnnnnnnnnnnnnnnnnnnnnnnnnnnnnnnnnnnnnnnnnnnnnnnnnnnnnnnnnnnnnnnnnnnnnnnnnnnnnnnnnnnnnnnnnnnnnnnnnnnnnnnnnnnnnnnnnnnnnnnnnnnnnnnnnnnnnnnnnnnnnnnnnnnnnnnnnnnnnnnnnnnnnnnnnnnnnnnnnnnnnnnnnnnnnnnnnnnnnnnnnnnnnnnnnnnnnnnnnnnnnnnnnnnnnnnnnnnnnnnnnnnnnnnnnnnnnnnnnnnnnnnnnnnnnnnnnnnnnnnnnnnnnnnnnnnnnnnnnnnnnnnnnnnnnnnnnnnnnnnnnnnnnnnnnnnnnnnnnnnnnnnnnnnnnnnnnnnnnnnnnnnnnnnnnnnnnnnnnnnnnnnnnnnnnnnnnnnnnnnnnnnnnnnnnnnnnnnnnnnnnnnnnnnnnnnnnnnnnnnnnnnnnnnnnnnnnnnnnnnnnnnnnnnnnnnnnnnnnnnnnnnnnnnnnnnnnnnnnnnnnnnnnnnnnnnnnnnnnnnnnnnnnnnnnnnnnnnnnnnnnnnnnnnnnnnnnnnnnnnnnnnnnnnnnnnnnnnnnnnnnnnnnnnnnnnnnnnnnnnnnnnnnnnnnnnnnnnnnnnnnnnnnnnnnnnnnnnnnnnnnnnnnnnnnnnnnnnnnnnnnnnnnnnnnnnnnnnnnnnnnnnnnnnnnnnnnnnnnnnnnnnnnnnnnnnnnnnnnnnnnnnnnnnnnnnnnnnnnnnnnnnnnnnnnnnnnnnnnnnnnnnnnnnnnnnnnnnnnnnnnnnnnnnnnnnnnnnnnnnnnnnnnnnnnnnnnnnnnnnnnnnnnnnnnnnnnnnnnnnnnnnnnnnnnnnnnnnnnnnnnnnnnnnnnnnnnnnnnnnnnnnnnnnnnnnnnnnnnnnnnnnnnnnnnnnnnnnnnnnnnnnnnnnnnnnnnnnnnnnnnnnnnnnnnnnnnnnnnnnnnnnnnnnnnnnnnnnnnnnnnnnnnnnnnnnnnnnnnnnnnnnnnnnnnnnnnnnnnnnnnnnnnnnnnnnnnnnnnnnnnnnnnnnnnnnnnnnnnnnnnnnnnnnnnnnnnnnnnnnnnnnnnnnnnnnnnnnnnnnnnnnnnnnnnnnnnnnnnnnnnnnnnnnnnnnnnnnnnnnnnnnnnnnnnnnnnnnnnnnnnnnnnnnnnnnnnnnnnnnnnnnnnnnnnnnnnnnnnnnnnnnnnnnnnnnnnnnnnnnnnnnnnnnnnnnnnnnnnnnnnnnnnnnnnnnnnnnnnnnnnnnnnnnnnnnnnnnnnnnnnnnnnnnnnnnnnnnnnnnnnnnnnnnnnnnnnnnnnnnnnnnnnnnnnnnnnnnnnnnnnnnnnnnnnnnnnnnnnnnnnnnnnnnnnnnnnnnnnnnnnnnnnnnnnnnnnnnnnnnnnnnnnnnnnnnnnnnnnnnnnnnnnnnnnnnnnnnnnnnnnnnnnnnnnnnnnnnnnnnnnnnnnnnnnnnnnnnnnnnnnnnnnnnnnnnnnnnnnnnnnnnnnnnnnnnnnnnnnnnnnnnnnnnnnnnnnnnnnnnnnnnnnnnnnnnnnnnnnnnnnnnnnnnnnnnnnnnnnnnnnnnnnnnnnnnnnnnnnnnnnnnnnnnnnnnnnnnnnnnnnnnnnnnnnnnnnnnnnnnnnnnnnnnnnnnnnnnnnnnnnnnnnnnnnnnnnnnnnnnnnnnnnnnnnnnnnnnnnnnnnnnnnnnnnnnnnnnnnnnnnnnnnnnnnnnnnnnnnnnnnnnnnnnnnnnnnnnnnnnnnnnnnnnnnnnnnnnnnnnnnnnnnnnnnnnnnnnnnnnnnnnnnnnnnnnnnnnnnnnnnnnnnnnnnnnnnnnnnnnnnnnnnnnnnnnnnnnnnnnnnnnnnnnnnnnnnnnnnnnnnnnnnnnnnnnnnnnnnnnnnnnnnnnnnnnnnnnnnnnnnnnnnnnnnnnnnnnnnnnnnnnnnnnnnnnnnnnnnnnnnnnnnnnnnnnnnnnnnnnnnnnnnnnnnnnnnnnnnnnnnnnnnnnnnnnnnnnnnnnnnnnnnnnnnnnnnnnnnnnnnnnnnnnnnnnnnnnnnnnnnnnnnnnnnnnnnnnnnnnnnnnnnnnnnnnnnnnnnnnnnnnnnnnnnnnnnnnnnnnnnnnnnnnnnnnnnnnnnnnnnnnnnnnnnnnnnnnnnnnnnnnnnnnnnnnnnnnnnnnnnnnnnnnnnnnnnnnnnnnnnnnnnnnnnnnnnnnnnnnnnnnnnnnnnnnnnnnnnnnnnnnnnnnnnnnnnnnnnnnnnnnnnnnnnnnnnnnnnnnnnnnnnnnnnnnnnnnnnnnnnnnnnnnnnnnnnnnnnnnnnnnnnnnnnnnnnnnnnnnnnnnnnnnnnnnnnnnnnnnnnnnnnnnnnnnnnnnnnnnnnnnnnnnnnnnnnnnnnnnnnnnnnnnnnnnnnnnnnnnnnnnnnnnnnnnnnnnnnnnnnnnnnnnnnnnnnnnnnnnnnnnnnnnnnnnnnnnnnnnnnnnnnnnnnnnnnnnnnnnnnnnnnnnnnnnnnnnnnnnnnnnnnnnnnnnnnnnnnnnnnnnnnnnnnnnnnnnnnnnnnnnnnnnnnnnnnnnnnnnnnnnnnnnnnnnnnnnnnnnnnnnnnnnnnnnnnnnnnnnnnnnnnnnnnnnnnnnnnnnnnnnnnnnnnnnnnnnnnnnnnnnnnnnnnnnnnnnnnnnnnnnnnnnnnnnnnnnnnnnnnnnnnnnnnnnnnnnnnnnnnnnnnnnnnnnnnnnnnnnnnnnnnnnnnnnnnnnnnnnnnnnnnnnnnnnnnnnnnnnnnnnnnnnnnnnnnnnnnnnnnnnnnnnnnnnnnnnnnnnnnnnnnnnnnnnnnnnnnnnnnnnnnnnnnnnnnnnnnnnnnnnnnnnnnnnnnnnnnnnnnnnnnnnnnnnnnnnnnnnnnnnnnnnnnnnnnnnnnnnnnnnnnnnnnnnnnnnnnnnnnnnnnnnnnnnnnnnnnnnnnnnnnnnnnnnnnnnnnnnnnnnnnnnnnnnnnnnnnnnnnnnnnnnnnnnnnnnnnnnnnnnnnnnnnnnnnnnnnnnnnnnnnnnnnnnnnnnnnnnnnnnnnnnnnnnnnnnnnnnnnnnnnnnnnnnnnnnnnnnnnnnnnnnnnnnnnnnnnnnnnnnnnnnnnnnnnnnnnnnnnnnnnnnnnnnnnnnnnnnnnnnnnnnnnnnnnnnnnnnnnnnnnnnnnnnnnnnnnnnnnnnnnnnnnnnnnnnnnnnnnnnnnnnnnnnnnnnnnnnnnnnnnnnnnnnnnnnnnnnnnnnnnnnnnnnnnnnnnnnnnnnnnnnnnnnnnnnnnnnnnnnnnnnnnnnnnnnnnnnnnnnnnnnnnnnnnnnnnnnnnnnnnnnnnnnnnnnnnnnnnnnnnnnnnnnnnnnnnnnnnnnnnnnnnnnnnnnnnnnnnnnnnnnnnnnnnnnnnnnnnnnnnnnnnnnnnnnnnnnnnnnnnnnnnnnnnnnnnnnnnnnnnnnnnnnnnnnnnnnnnnnnnnnnnnnnnnnnnnnnnnnnnnnnnnnnnnnnnnnnnnnnnnnnnnnnnnnnnnnnnnnnnnnnnnnnnnnnnnnnnnnnnnnnnnnnnnnnnnnnnnnnnnnnnnnnnnnnnnnnnnnnnnnnnnnnnnnnnnnnnnnnnnnnnnnnnnnnnnnnnnnnnnnnnnnnnnnnnnnnnnnnnnnnnnnnnnnnnnnnnnnnnnnnnnnnnnnnnnnnnnnnnnnnnnnnnnnnnnnnnnnnnnnnnnnnnnnnnnnnnnnnnnnnnnnnnnnnnnnnnnnnnnnnnnnnnnnnnnnnnnnnnnnnnnnnnnnnnnnnnnnnnnnnnnnnnnnnnnnnnnnnnnnnnnnnnnnnnnnnnnnnnnnnnnnnnnnnnnnnnnnnnnnnnnnnnnnnnnnnnnnnnnnnnnnnnnnnnnnnnnnnnnnnnnnnnnnnnnnnnnnnnnnnnnnnnnnnnnnnnnnnnnnnnnnnnnnnnnnnnnnnnnnnnnnnnnnnnnnnnnnnnnnnnnnnnnnnnnnnnnnnnnnnnnnnnnnnnnnnnnnnnnnnnnnnnnnnnnnnnnnnnnnnnnnnnnnnnnnnnnnnnnnnnnnnnnnnnnnnnnnnnnnnnnnnnnnnnnnnnnnnnnnnnnnnnnnnnnnnnnnnnnnnnnnnnnnnnnnnnnnnnnnnnnnnnnnnnnnnnnnnnnnnnnnnnnnnnnnnnnnnnnnnnnnnnnnnnnnnnnnnnnnnnnnnnnnnnnnnnnnnnnnnnnnnnnnnnnnnnnnnnnnnnnnnnnnnnnnnnnnnnnnnnnnnnnnnnnnnnnnnnnnnnnnnnnnnnnnnnnnnnnnnnnnnnnnnnnnnnnnnnnnnnnnnnnnnnnnnnnnnnnnnnnnnnnnnnnnnnnnnnnnnnnnnnnnnnnnnnnnnnnnnnnnnnnnnnnnnnnnnnnnnnnnnnnnnnnnnnnnnnnnnnnnnnnnnnnnnnnnnnnnnnnnnnnnnnnnnnnnnnnnnnnnnnnnnnnnnnnnnnnnnnnnnnnnnnnnnnnnnnnnnnnnnnnnnnnnnnnnnnnnnnnnnnnnnnnnnnnnnnnnnnnnnnnnnnnnnnnnnnnnnnnnnnnnnnnnnnnnnnnnnnnnnnnnnnnnnnnnnnnnnnnnnnnnnnnnnnnnnnnnnnnnnnnnnnnnnnnnnnnnnnnnnnnnnnnnnnnnnnnnnnnnnnnnnnnnnnnnnnnnnnnnnnnnnnnnnnnnnnnnnnnnnnnnnnnnnnnnnnnnnnnnnnnnnnnnnnnnnnnnnnnnnnnnnnnnnnnnnnnnnnnnnnnnnnnnnnnnnnnnnnnnnnnnnnnnnnnnnnnnnnnnnnnnnnnnnnnnnnnnnnnnnnnnnnnnnnnnnnnnnnnnnnnnnnnnnnnnnnnnnnnnnnnnnnnnnnnnnnnnnnnnnnnnnnnnnnnnnnnnnnnnnnnnnnnnnnnnnnnnnnnnnnnnnnnnnnnnnnnnnnnnnnnnnnnnnnnnnnnnnnnnnnnnnnnnnnnnnnnnnnnnnnnnnnnnnnnnnnnnnnnnnnnnnnnnnnnnnnnnnnnnnnnnnnnnnnnnnnnnnnnnnnnnnnnnnnnnnnnnnnnnnnnnnnnnnnnnnnnnnnnnnnnnnnnnnnnnnnnnnnnnnnnnnnnnnnnnnnnnnnnnnnnnnnnnnnnnnnnnnnnnnnnnnnnnnnnnnnnnnnnnnnnnnnnnnnnnnnnnnnnnnnnnnnnnnnnnnnnnnnnnnnnnnnnnnnnnnnnnnnnnnnnnnnnnnnnnnnnnnnnnnnnnnnnnnnnnnnnnnnnnnnnnnnnnnnnnnnnnnnnnnnnnnnnnnnnnnnnnnnnnnnnnnnnnnnnnnnnnnnnnnnnnnnnnnnnnnnnnnnnnnnnnnnnnnnnnnnnnnnnnnnnnnnnnnnnnnnnnnnnnnnnnnnnnnnnnnnnnnnnnnnnnnnnnnnnnnnnnnnnnnnnnnnnnnnnnnnnnnnnnnnnnnnnnnnnnnnnnnnnnnnnnnnnnnnnnnnnnnnnnnnnnnnnnnnnnnnnnnnnnnnnnnnnnnnnnnnnnnnnnnnnnnnnnnnnnnnnnnnnnnnnnnnnnnnnnnnnnnnnnnnnnnnnnnnnnnnnnnnnnnnnnnnnnnnnnnnnnnnnnnnnnnnnnnnnnnnnnnnnnnnnnnnnnnnnnnnnnnnnnnnnnnnnnnnnnnnnnnnnnnnnnnnnnnnnnnnnnnnnnnnnnnnnnnnnnnnnnnnnnnnnnnnnnnnnnnnnnnnnnnnnnnnnnnnnnnnnnnnnnnnnnnnnnnnnnnnnnnnnnnnnnnnnnnnnnnnnnnnnnnnnnnnnnnnnnnnnnnnnnnnnnnnnnnnnnnnnnnnnnnnnnnnnnnnnnnnnnnnnnnnnnnnnnnnnnnnnnnnnnnnnnnnnnnnnnnnnnnnnnnnnnnnnnnnnnnnnnnnnnnnnnnnnnnnnnnnnnnnnnnnnnnnnnnnnnnnnnnnnnnnnnnnnnnnnnnnnnnnnnnnnnnnnnnnnnnnnnnnnnnnnnnnnnnnnnnnnnnnnnnnnnnnnnnnnnnnnnnnnnnnnnnnnnnnnnnnnnnnnnnnnnnnnnnnnnnnnnnnnnnnnnnnnnnnnnnnnnnnnnnnnnnnnnnnnnnnnnnnnnnnnnnnnnnnnnnnnnnnnnnnnnnnnnnnnnnnnnnnnnnnnnnnnnnnnnnnnnnnnnnnnnnnnnnnnnnnnnnnnnnnnnnnnnnnnnnnnnnnnnnnnnnnnnnnnnnnnnnnnnnnnnnnnnnnnnnnnnnnnnnnnnnnnnnnnnnnnnnnnnnnnnnnnnnnnnnnnnnnnnnnnnnnnnnnnnnnnnnnnnnnnnnnnnnnnnnnnnnnnnnnnnnnnnnnnnnnnnnnnnnnnnnnnnnnnnnnnnnnnnnnnnnnnnnnnnnnnnnnnnnnnnnnnnnnnnnnnnnnnnnnnnnnnnnnnnnnnnnnnnnnnnnnnnnnnnnnnnnnnnnnnnnnnnnnnnnnnnnnnnnnnnnnnnnnnnnnnnnnnnnnnnnnnnnnnnnnnnnnnnnnnnnnnnnnnnnnnnnnnnnnnnnnnnnnnnnnnnnnnnnnnnnnnnnnnnnnnnnnnnnnnnnnnnnnnnnnnnnnnnnnnnnnnnnnnnnnnnnnnnnnnnnnnnnnnnnnnnnnnnnnnnnnnnnnnnnnnnnnnnnnnnnnnnnnnnnnnnnnnnnnnnnnnnnnnnnnnnnnnnnnnnnnnnnnnnnnnnnnnnnnnnnnnnnnnnnnnnnnnnnnnnnnnnnnnnnnnnnnnnnnnnnnnnnnnnnnnnnnnnnnnnnnnnnnnnnnnnnnnnnnnnnnnnnnnnnnnnnnnnnnnnnnnnnnnnnnnnnnnnnnnnnnnnnnnnnnnnnnnnnnnnnnnnnnnnnnnnnnnnnnnnnnnnnnnnnnnnnnnnnnnnnnnnnnnnnnnnnnnnnnnnnnnnnnnnnnnnnnnnnnnnnnnnnnnnnnnnnnnnnnnnnnnnnnnnnnnnnnnnnnnnnnnnnnnnnnnnnnnnnnnnnnnnnnnnnnnnnnnnnnnnnnnnnnnnnnnnnnnnnnnnnnnnnnnnnnnnnnnnnnnnnnnnnnnnnnnnnnnnnnnnnnnnnnnnnnnnnnnnnnnnnnnnnnnnnnnnnnnnnnnnnnnnnnnnnnnnnnnnnnnnnnnnnnnnnnnnnnnnnnnnnnnnnnnnnnnnnnnnnnnnnnnnnnnnnnnnnnnnnnnnnnnnnnnnnnnnnnnnnnnnnnnnnnnnnnnnnnnnnnnnnnnnnnnnnnnnnnnnnnnnnnnnnnnnnnnnnnnnnnnnnnnnnnnnnnnnnnnnnnnnnnnnnnnnnnnnnnnnnnnnnnnnnnnnnnnnnnnnnnnnnnnnnnnnnnnnnnnnnnnnnnnnnnnnnnnnnnnnnnnnnnnnnnnnnnnnnnnnnnnnnnnnnnnnnnnnnnnnnnnnnnnnnnnnnnnnnnnnnnnnnnnnnnnnnnnnnnnnnnnnnnnnnnnnnnnnnnnnnnnnnnnnnnnnnnnnnnnnnnnnnnnnnnnnnnnnnnnnnnnnnnnnnnnnnnnnnnnnnnnnnnnnnnnnnnnnnnnnnnnnnnnnnnnnnnnnnnnnnnnnnnnnnnnnnnnnnnnnnnnnnnnnnnnnnnnnnnnnnnnnnnnnnnnnnnnnnnnnnnnnnnnnnnnnnnnnnnnnnnnnnnnnnnnnnnnnnnnnnnnnnnnnnnnnnnnnnnnnnnnnnnnnnnnnnnnnnnnnnnnnnnnnnnnnnnnnnnnnnnnnnnnnnnnnnnnnnnnnnnnnnnnnnnnnnnnnnnnnnnnnnnnnnnnnnnnnnnnnnnnnnnnnnnnnnnnnnnnnnnnnnnnnnnnnnnnnnnnnnnnnnnnnnnnnnnnnnnnnnnnnnnnnnnnnnnnnnnnnnnnnnnnnnnnnnnnnnnnnnnnnnnnnnnnnnnnnnnnnnnnnnnnnnnnnnnnnnnnnnnnnnnnnnnnnnnnnnnnnnnnnnnnnnnnnnnnnnnnnnnnnnnnnnnnnnnnnnnnnnnnnnnnnnnnnnnnnnnnnnnnnnnnnnnnnnnnnnnnnnnnnnnnnnnnnnnnnnnnnnnnnnnnnnnnnnnnnnnnnnnnnnnnnnnnnnnnnnnnnnnnnnnnnnnnnnnnnnnnnnnnnnnnnnnnnnnnnnnnnnnnnnnnnnnnnnnnnnnnnnnnnnnnnnnnnnnnnnnnnnnnnnnnnnnnnnnnnnnnnnnnnnnnnnnnnnnnnnnnnnnnnnnnnnnnnnnnnnnnnnnnnnnnnnnnnnnnnnnnnnnnnnnnnnnnnnnnnnnnnnnnnnnnnnnnnnnnnnnnnnnnnnnnnnnnnnnnnnnnnnnnnnnnnnnnnnnnnnnnnnnnnnnnnnnnnnnnnnnnnnnnnnnnnnnnnnnnnnnnnnnnnnnnnnnnnnnnnnnnnnnnnnnnnnnnnnnnnnnnnnnnnnnnnnnnnnnnnnnnnnnnnnnnnnnnnnnnnnnnnnnnnnnnnnnnnnnnnnnnnnnnnnnnnnnnnnnnnnnnnnnnnnnnnnnnnnnnnnnnnnnnnnnnnnnnnnnnnnnnnnnnnnnnnnnnnnnnnnnnnnnnnnnnnnnnnnnnnnnnnnnnnnnnnnnnnnnnnnnnnnnnnnnnnnnnnnnnnnnnnnnnnnnnnnnnnnnnnnnnnnnnnnnnnnnnnnnnnnnnnnnnnnnnnnnnnnnnnnnnnnnnnnnnnnnnnnnnnnnnnnnnnnnnnnnnnnnnnnnnnnnnnnnnnnnnnnnnnnnnnnnnnnnnnnnnnnnnnnnnnnnnnnnnnnnnnnnnnnnnnnnnnnnnnnnnnnnnnnnnnnnnnnnnnnnnnnnnnnnnnnnnnnnnnnnnnnnnnnnnnnnnnnnnnnnnnnnnnnnnnnnnnnnnnnnnnnnnnnnnnnnnnnnnnnnnnnnnnnnnnnnnnnnnnnnnnnnnnnnnnnnnnnnnnnnnnnnnnnnnnnnnnnnnnnnnnnnnnnnnnnnnnnnnnnnnnnnnnnnnnnnnnnnnnnnnnnnnnnnnnnnnnnnnnnnnnnnnnnnnnnnnnnnnnnnnnnnnnnnnnnnnnnnnnnnnnnnnnnnnnnnnnnnnnnnnnnnnnnnnnnnnnnnnnnnnnnnnnnnnnnnnnnnnnnnnnnnnnnnnnnnnnnnnnnnnnnnnnnnnnnnnnnnnnnnnnnnnnnnnnnnnnnnnnnnnnnnnnnnnnnnnnnnnnnnnnnnnnnnnnnnnnnnnnnnnnnnnnnnnnnnnnnnnnnnnnnnnnnnnnnnnnnnnnnnnnnnnnnnnnnnnnnnnnnnnnnnnnnnnnnnnnnnnnnnnnnnnnnnnnnnnnnnnnnnnnnnnnnnnnnnnnnnnnnnnnnnnnnnnnnnnnnnnnnnnnnnnnnnnnnnnnnnnnnnnnnnnnnnnnnnnnnnnnnnnnnnnnnnnnnnnnnnnnnnnnnnnnnnnnnnnnnnnnnnnnnnnnnnnnnnnnnnnnnnnnnnnnnnnnnnnnnnnnnnnnnnnnnnnnnnnnnnnnnnnnnnnnnnnnnnnnnnnnnnnnnnnnnnnnnnnnnnnnnnnnnnnnnnnnnnnnnnnnnnnnnnnnnnnnnnnnnnnnnnnnnnnnnnnnnnnnnnnnnnnnnnnnnnnnnnnnnnnnnnnnnnnnnnnnnnnnnnnnnnnnnnnnnnnnnnnnnnnnnnnnnnnnnnnnnnnnnnnnnnnnnnnnnnnnnnnnnnnnnnnnnnnnnnnnnnnnnnnnnnnnnnnnnnnnnnnnnnnnnnnnnnnnnnnnnnnnnnnnnnnnnnnnnnnnnnnnnnnnnnnnnnnnnnnnnnnnnnnnnnnnnnnnnnnnnnnnnnnnnnnnnnnnnnnnnnnnnnnnnnnnnnnnnnnnnnnnnnnnnnnnnnnnnnnnnnnnnnnnnnnnnnnnnnnnnnnnnnnnnnnnnnnnnnnnnnnnnnnnnnnnnnnnnnnnnnnnnnnnnnnnnnnnnnnnnnnnnnnnnnnnnnnnnnnnnnnnnnnnnnnnnnnnnnnnnnnnnnnnnnnnnnnnnnnnnnnnnnnnnnnnnnnnnnnnnnnnnnnnnnnnnnnnnnnnnnnnnnnnnnnnnnnnnnnnnnnnnnnnnnnnnnnnnnnnnnnnnnnnnnnnnnnnnnnnnnnnnnnnnnnnnnnnnnnnnnnnnnnnnnnnnnnnnnnnnnnnnnnnnnnnnnnnnnnnnnnnnnnnnnnnnnnnnnnnnnnnnnnnnnnnnnnnnnnnnnnnnnnnnnnnnnnnnnnnnnnnnnnnnnnnnnnnnnnnnnnnnnnnnnnnnnnnnnnnnnnnnnnnnnnnnnnnnnnnnnnnnnnnnnnnnnnnnnnnnnnnnnnnnnnnnnnnnnnnnnnnnnnnnnnnnnnnnnnnnnnnnnnnnnnnnnnnnnnnnnnnnnnnnnnnnnnnnnnnnnnnnnnnnnnnnnnnnnnnnnnnnnnnnnnnnnnnnnnnnnnnnnnnnnnnnnnnnnnnnnnnnnnnnnnnnnnnnnnnnnnnnnnnnnnnnnnnnnnnnnnnnnnnnnnnnnnnnnnnnnnnnnnnnnnnnnnnnnnnnnnnnnnnnnnnnnnnnnnnnnnnnnnnnnnnnnnnnnnnnnnnnnnnnnnnnnnnnnnnnnnnnnnnnnnnnnnnnnnnnnnnnnnnnnnnnnnnnnnnnnnnnnnnnnnnnnnnnnnnnnnnnnnnnnnnnnnnnnnnnnnnnnnnnnnnnnnnnnnnnnnnnnnnnnnnnnnnnnnnnnnnnnnnnnnnnnnnnnnnnnnnnnnnnnnnnnnnnnnnnnnnnnnnnnnnnnnnnnnnnnnnnnnnnnnnnnnnnnnnnnnnnnnnnnnnnnnnnnnnnnnnnnnnnnnnnnnnnnnnnnnnnnnnnnnnnnnnnnnnnnnnnnnnnnnnnnnnnnnnnnnnnnnnnnnnnnnnnnnnnnnnnnnnnnnnnnnnnnnnnnnnnnnnnnnnnnnnnnnnnnnnnnnnnnnnnnnnnnnnnnnnnnnnnnnnnnnnnnnnnnnnnnnnnnnnnnnnnnnnnnnnnnnnnnnnnnnnnnnnnnnnnnnnnnnnnnnnnnnnnnnnnnnnnnnnnnnnnnnnnnnnnnnnnnnnnnnnnnnnnnnnnnnnnnnnnnnnnnnnnnnnnnnnnnnnnnnnnnnnnnnnnnnnnnnnnnnnnnnnnnnnnnnnnnnnnnnnnnnnnnnnnnnnnnnnnnnnnnnnnnnnnnnnnnnnnnnnnnnnnnnnnnnnnnnnnnnnnnnnnnnnnnnnnnnnnnnnnnnnnnnnnnnnnnnnnnnnnnnnnnnnnnnnnnnnnnnnnnnnnnnnnnnnnnnnnnnnnnnnnnnnnnnnnnnnnnnnnnnnnnnnnnnnnnnnnnnnnnnnnnnnnnnnnnnnnnnnnnnnnnnnnnnnnnnnnnnnnnnnnnnnnnnnnnnnnnnnnnnnnnnnnnnnnnnnnnnnnnnnnnnnnnnnnnnnnnnnnnnnnnnnnnnnnnnnnnnnnnnnnnnnnnnnnnnnnnnnnnnnnnnnnnnnnnnnnnnnnnnnnnnnnnnnnnnnnnnnnnnnnnnnnnnnnnnnnnnnnnnnnnnnnnnnnnnnnnnnnnnnnnnnnnnnnnnnnnnnnnnnnnnnnnnnnnnnnnnnnnnnnnnnnnnnnnnnnnnnnnnnnnnnnnnnnnnnnnnnnnnnnnnnnnnnnnnnnnnnnnnnnnnnnnnnnnnnnnnnnnnnnnnnnnnnnnnnnnnnnnnnnnnnnnnnnnnnnnnnnnnnnnnnnnnnnnnnnnnnnnnnnnnnnnnnnnnnnnnnnnnnnnnnnnnnnnnnnnnnnnnnnnnnnnnnnnnnnnnnnnnnnnnnnnnnnnnnnnnnnnnnnnnnnnnnnnnnnnnnnnnnnnnnnnnnnnnnnnnnnnnnnnnnnnnnnnnnnnnnnnnnnnnnnnnnnnnnnnnnnnnnnnnnnnnnnnnnnnnnnnnnnnnnnnnnnnnnnnnnnnnnnnnnnnnnnnnnnnnnnnnnnnnnnnnnnnnnnnnnnnnnnnnnnnnnnnnnnnnnnnnnnnnnnnnnnnnnnnnnnnnnnnnnnnnnnnnnnnnnnnnnnnnnnnnnnnnnnnnnnnnnnnnnnnnnnnnnnnnnnnnnnnnnnnnnnnnnnnnnnnnnnnnnnnnnnnnnnnnnnnnnnnnnnnnnnnnnnnnnnnnnnnnnnnnnnnnnnnnnnnnnnnnnnnnnnnnnnnnnnnnnnnnnnnnnnnnnnnnnnnnnnnnnnnnnnnnnnnnnnnnnnnnnnnnnnnnnnnnnnnnnnnnnnnnnnnnnnnnnnnnnnnnnnnnnnnnnnnnnnnnnnnnnnnnnnnnnnnnnnnnnnnnnnnnnnnnnnnnnnnnnnnnnnnnnnnnnnnnnnnnnnnnnnnnnnnnnnnnnnnnnnnnnnnnnnnnnnnnnnnnnnnnnnnnnnnnnnnnnnnnnnnnnnnnnnnnnnnnnnnnnnnnnnnnnnnnnnnnnnnnnnnnnnnnnnnnnnnnnnnnnnnnnnnnnnnnnnnnnnnnnnnnnnnnnnnnnnnnnnnnnnnnnnnnnnnnnnnnnnnnnnnnnnnnnnnnnnnnnnnnnnnnnnnnnnnnnnnnnnnnnnnnnnnnnnnnnnnnnnnnnnnnnnnnnnnnnnnnnnnnnnnnnnnnnnnnnnnnnnnnnnnnnnnnnnnnnnnnnnnnnnnnnnnnnnnnnnnnnnnnnnnnnnnnnnnnnnnnnnnnnnnnnnnnnnnnnnnnnnnnnnnnnnnnnnnnnnnnnnnnnnnnnnnnnnnnnnnnnnnnnnnnnnnnnnnnnnnnnnnnnnnnnnnnnnnnnnnnnnnnnnnnnnnnnnnnnnnnnnnnnnnnnnnnnnnnnnnnnnnnnnnnnnnnnnnnnnnnnnnnnnnnnnnnnnnnnnnnnnnnnnnnnnnnnnnnnnnnnnnnnnnnnnnnnnnnnnnnnnnnnnnnnnnnnnnnnnnnnnnnnnnnnnnnnnnnnnnnnnnnnnnnnnnnnnnnnnnnnnnnnnnnnnnnnnnnnnnnnnnnnnnnnnnnnnnnnnnnnnnnnnnnnnnnnnnnnnnnnnnnnnnnnnnnnnnnnnnnnnnnnnnnnnnnnnnnnnnnnnnnnnnnnnnnnnnnnnnnnnnnnnnnnnnnnnnnnnnnnnnnnnnnnnnnnnnnnnnnnnnnnnnnnnnnnnnnnnnnnnnnnnnnnnnnnnnnnnnnnnnnnnnnnnnnnnnnnnnnnnnnnnnnnnnnnnnnnnnnnnnnnnnnnnnnnnnnnnnnnnnnnnnnnnnnnnnnnnnnnnnnnnnnnnnnnnnnnnnnnnnnnnnnnnnnnnnnnnnnnnnnnnnnnnnnnnnnnnnnnnnnnnnnnnnnnnnnnnnnnnnnnnnnnnnnnnnnnnnnnnnnnnnnnnnnnnnnnnnnnnnnnnnnnnnnnnnnnnnnnnnnnnnnnnnnnnnnnnnnnnnnnnnnnnnnnnnnnnnnnnnnnnnnnnnnnnnnnnnnnnnnnnnnnnnnnnnnnnnnnnnnnnnnnnnnnnnnnnnnnnnnnnnnnnnnnnnnnnnnnnnnnnnnnnnnnnnnnnnnnnnnnnnnnnnnnnnnnnnnnnnnnnnnnnnnnnnnnnnnnnnnnnnnnnnnnnnnnnnnnnnnnnnnnnnnnnnnnnnnnnnnnnnnnnnnnnnnnnnnnnnnnnnnnnnnnnnnnnnnnnnnnnnnnnnnnnnnnnnnnnnnnnnnnnnnnnnnnnnnnnnnnnnnnnnnnnnnnnnnnnnnnnnnnnnnnnnnnnnnnnnnnnnnnnnnnnnnnnnnnnnnnnnnnnnnnnnnnnnnnnnnnnnnnnnnnnnnnnnnnnnnnnnnnnnnnnnnnnnnnnnnnnnnnnnnnnnnnnnnnnnnnnnnnnnnnnnnnnnnnnnnnnnnnnnnnnnnnnnnnnnnnnnnnnnnnnnnnnnnnnnnnnnnnnnnnnnnnnnnnnnnnnnnnnnnnnnnnnnnnnnnnnnnnnnnnnnnnnnnnnnnnnnnnnnnnnnnnnnnnnnnnnnnnnnnnnnnnnnnnnnnnnnnnnnnnnnnnnnnnnnnnnnnnnnnnnnnnnnnnnnnnnnnnnnnnnnnnnnnnnnnnnnnnnnnnnnnnnnnnnnnnnnnnnnnnnnnnnnnnnnnnnnnnnnnnnnnnnnnnnnnnnnnnnnnnnnnnnnnnnnnnnnnnnnnnnnnnnnnnnnnnnnnnnnnnnnnnnnnnnnnnnnnnnnnnnnnnnnnnnnnnnnnnnnnnnnnnnnnnnnnnnnnnnnnnnnnnnnnnnnnnnnnnnnnnnnnnnnnnnnnnnnnnnnnnnnnnnnnnnnnnnnnnnnnnnnnnnnnnnnnnnnnnnnnnnnnnnnnnnnnnnnnnnnnnnnnnnnnnnnnnnnnnnnnnnnnnnnnnnnnnnnnnnnnnnnnnnnnnnnnnnnnnnnnnnnnnnnnnnnnnnnnnnnnnnnnnnnnnnnnnnnnnnnnnnnnnnnnnnnnnnnnnnnnnnnnnnnnnnnnnnnnnnnnnnnnnnnnnnnnnnnnnnnnnnnnnnnnnnnnnnnnnnnnnnnnnnnnnnnnnnnnnnnnnnnnnnnnnnnnnnnnnnnnnnnnnnnnnnnnnnnnnnnnnnnnnnnnnnnnnnnnnnnnnnnnnnnnnnnnnnnnnnnnnnnnnnnnnnnnnnnnnnnnnnnnnnnnnnnnnnnnnnnnnnnnnnnnnnnnnnnnnnnnnnnnnnnnnnnnnnnnnnnnnnnnnnnnnnnnnnnnnnnnnnnnnnnnnnnnnnnnnnnnnnnnnnnnnnnnnnnnnnnnnnnnnnnnnnnnnnnnnnnnnnnnnnnnnnnnnnnnnnnnnnnnnnnnnnnnnnnnnnnnnnnnnnnnnnnnnnnnnnnnnnnnnnnnnnnnnnnnnnnnnnnnnnnnnnnnnnnnnnnnnnnnnnnnnnnnnnnnnnnnnnnnnnnnnnnnnnnnnnnnnnnnnnnnnnnnnnnnnnnnnnnnnnnnnnnnnnnnnnnnnnnnnnnnnnnnnnnnnnnnnnnnnnnnnnnnnnnnnnnnnnnnnnnnnnnnnnnnnnnnnnnnnnnnnnnnnnnnnnnnnnnnnnnnnnnnnnnnnnnnnnnnnnnnnnnnnnnnnnnnnnnnnnnnnnnnnnnnnnnnnnnnnnnnnnnnnnnnnnnnnnnnnnnnnnnnnnnnnnnnnnnnnnnnnnnnnnnnnnnnnnnnnnnnnnnnnnnnnnnnnnnnnnnnnnnnnnnnnnnnnnnnnnnnnnnnnnnnnnnnnnnnnnnnnnnnnnnnnnnnnnnnnnnnnnnnnnnnnnnnnnnnnnnnnnnnnnnnnnnnnnnnnnnnnnnnnnnnnnnnnnnnnnnnnnnnnnnnnnnnnnnnnnnnnnnnnnnnnnnnnnnnnnnnnnnnnnnnnnnnnnnnnnnnnnnnnnnnnnnnnnnnnnnnnnnnnnnnnnnnnnnnnnnnnnnnnnnnnnnnnnnnnnnnnnnnnnnnnnnnnnnnnnnnnnnnnnnnnnnnnnnnnnnnnnnnnnnnnnnnnnnnnnnnnnnnnnnnnnnnnnnnnnnnnnnnnnnnnnnnnnnnnnnnnnnnnnnnnnnnnnnnnnnnnnnnnnnnnnnnnnnnnnnnnnnnnnnnnnnnnnnnnnnnnnnnnnnnnnnnnnnnnnnnnnnnnnnnnnnnnnnnnnnnnnnnnnnnnnnnnnnnnnnnnnnnnnnnnnnnnnnnnnnnnnnnnnnnnnnnnnnnnnnnnnnnnnnnnnnnnnnnnnnnnnnnnnnnnnnnnnnnnnnnnnnnnnnnnnnnnnnnnnnnnnnnnnnnnnnnnnnnnnnnnnnnnnnnnnnnnnnnnnnnnnnnnnnnnnnnnnnnnnnnnnnnnnnnnnnnnnnnnnnnnnnnnnnnnnnnnnnnnnnnnnnnnnnnnnnnnnnnnnnnnnnnnnnnnnnnnnnnnnnnnnnnnnnnnnnnnnnnnnnnnnnnnnnnnnnnnnnnnnnnnnnnnnnnnnnnnnnnnnnnnnnnnnnnnnnnnnnnnnnnnnnnnnnnnnnnnnnnnnnnnnnnnnnnnnnnnnnnnnnnnnnnnnnnnnnnnnnnnnnnnnnnnnnnnnnnnnnnnnnnnnnnnnnnnnnnnnnnnnnnnnnnnnnnnnnnnnnnnnnnnnnnnnnnnnnnnnnnnnnnnnnnnnnnnnnnnnnnnnnnnnnnnnnnnnnnnnnnnnnnnnnnnnnnnnnnnnnnnnnnnnnnnnnnnnnnnnnnnnnnnnnnnnnnnnnnnnnnnnnnnnnnnnnnnnnnnnnnnnnnnnnnnnnnnnnnnnnnnnnnnnnnnnnnnnnnnnnnnnnnnnnnnnnnnnnnnnnnnnnnnnnnnnnnnnnnnnnnnnnnnnnnnnnnnnnnnnnnnnnnnnnnnnnnnnnnnnnnnnnnnnnnnnnnnnnnnnnnnnnnnnnnnnnnnnnnnnnnnnnnnnnnnnnnnnnnnnnnnnnnnnnnnnnnnnnnnnnnnnnnnnnnnnnnnnnnnnnnnnnnnnnnnnnnnnnnnnnnnnnnnnnnnnnnnnnnnnnnnnnnnnnnnnnnnnnnnnnnnnnnnnnnnnnnnnnnnnnnnnnnnnnnnnnnnnnnnnnnnnnnnnnnnnnnnnnnnnnnnnnnnnnnnnnnnnnnnnnnnnnnnnnnnnnnnnnnnnnnnnnnnnnnnnnnnnnnnnnnnnnnnnnnnnnnnnnnnnnnnnnnnnnnnnnnnnnnnnnnnnnnnnnnnnnnnnnnnnnnnnnnnnnnnnnnnnnnnnnnnnnnnnnnnnnnnnnnnnnnnnnnnnnnnnnnnnnnnnnnnnnnnnnnnnnnnnnnnnnnnnnnnnnnnnnnnnnnnnnnnnnnnnnnnnnnnnnnnnnnnnnnnnnnnnnnnnnnnnnnnnnnnnnnnnnnnnnnnnnnnnnnnnnnnnnnnnnnnnnnnnnnnnnnnnnnnnnnnnnnnnnnnnnnnnnnnnnnnnnnnnnnnnnnnnnnnnnnnnnnnnnnnnnnnnnnnnnnnnnnnnnnnnnnnnnnnnnnnnnnnnnnnnnnnnnnnnnnnnnnnnnnnnnnnnnnnnnnnnnnnnnnnnnnnnnnnnnnnnnnnnnnnnnnnnnnnnnnnnnnnnnnnnnnnnnnnnnnnnnnnnnnnnnnnnnnnnnnnnnnnnnnnnnnnnnnnnnnnnnnnnnnnnnnnnnnnnnnnnnnnnnnnnnnnnnnnnnnnnnnnnnnnnnnnnnnnnnnnnnnnnnnnnnnnnnnnnnnnnnnnnnnnnnnnnnnnnnnnnnnnnnnnnnnnnnnnnnnnnnnnnnnnnnnnnnnnnnnnnnnnnnnnnnnnnnnnnnnnnnnnnnnnnnnnnnnnnnnnnnnnnnnnnnnnnnnnnnnnnnnnnnnnnnnnnnnnnnnnnnnnnnnnnnnnnnnnnnnnnnnnnnnnnnnnnnnnnnnnnnnnnnnnnnnnnnnnnnnnnnnnnnnnnnnnnnnnnnnnnnnnnnnnnnnnnnnnnnnnnnnnnnnnnnnnnnnnnnnnnnnnnnnnnnnnnnnnnnnnnnnnnnnnnnnnnnnnnnnnnnnnnnnnnnnnnnnnnnnnnnnnnnnnnnnnnnnnnnnnnnnnnnnnnnnnnnnnnnnnnnnnnnnnnnnnnnnnnnnnnnnnnnnnnnnnnnnnnnnnnnnnnnnnnnnnnnnnnnnnnnnnnnnnnnnnnnnnnnnnnnnnnnnnnnnnnnnnnnnnnnnnnnnnnnnnnnnnnnnnnnnnnnnnnnnnnnnnnnnnnnnnnnnnnnnnnnnnnnnnnnnnnnnnnnnnnnnnnnnnnnnnnnnnnnnnnnnnnnnnnnnnnnnnnnnnnnnnnnnnnnnnnnnnnnnnnnnnnnnnnnnnnnnnnnnnnnnnnnnnnnnnnnnnnnnnnnnnnnnnnnnnnnnnnnnnnnnnnnnnnnnnnnnnnnnnnnnnnnnnnnnnnnnnnnnnnnnnnnnnnnnnnnnnnnnnnnnnnnnnnnnnnnnnnnnnnnnnnnnnnnnnnnnnnnnnnnnnnnnnnnnnnnnnnnnnnnnnnnnnnnnnnnnnnnnnnnnnnnnnnnnnnnnnnnnnnnnnnnnnnnnnnnnnnnnnnnnnnnnnnnnnnnnnnnnnnnnnnnnnnnnnnnnnnnnnnnnnnnnnnnnnnnnnnnnnnnnnnnnnnnnnnnnnnnnnnnnnnnnnnnnnnnnnnnnnnnnnnnnnnnnnnnnnnnnnnnnnnnnnnnnnnnnnnnnnnnnnnnnnnnnnnnnnnnnnnnnnnnnnnnnnnnnnnnnnnnnnnnnnnnnnnnnnnnnnnnnnnnnnnnnnnnnnnnnnnnnnnnnnnnnnnnnnnnnnnnnnnnnnnnnnnnnnnnnnnnnnnnnnnnnnnnnnnnnnnnnnnnnnnnnnnnnnnnnnnnnnnnnnnnnnnnnnnnnnnnnnnnnnnnnnnnnnnnnnnnnnnnnnnnnnnnnnnnnnnnnnnnnnnnnnnnnnnnnnnnnnnnnnnnnnnnnnnnnnnnnnnnnnnnnnnnnnnnnnnnnnnnnnnnnnnnnnnnnnnnnnnnnnnnnnnnnnnnnnnnnnnnnnnnnnnnnnnnnnnnnnnnnnnnnnnnnnnnnnnnnnnnnnnnnnnnnnnnnnnnnnnnnnnnnnnnnnnnnnnnnnnnnnnnnnnnnnnnnnnnnnnnnnnnnnnnnnnnnnnnnnnnnnnnnnnnnnnnnnnnnnnnnnnnnnnnnnnnnnnnnnnnnnnnnnnnnnnnnnnnnnnnnnnnnnnnnnnnnnnnnnnnnnnnnnnnnnnnnnnnnnnnnnnnnnnnnnnnnnnnnnnnnnnnnnnnnnnnnnnnnnnnnnnnnnnnnnnnnnnnnnnnnnnnnnnnnnnnnnnnnnnnnnnnnnnnnnnnnnnnnnnnnnnnnnnnnnnnnnnnnnnnnnnnnnnnnnnnnnnnnnnnnnnnnnnnnnnnnnnnnnnnnnnnnnnnnnnnnnnnnnnnnnnnnnnnnnnnnnnnnnnnnnnnnnnnnnnnnnnnnnnnnnnnnnnnnnnnnnnnnnnnnnnnnnnnnnnnnnnnnnnnnnnnnnnnnnnnnnnnnnnnnnnnnnnnnnnnnnnnnnnnnnnnnnnnnnnnnnnnnnnnnnnnnnnnnnnnnnnnnnnnnnnnnnnnnnnnnnnnnnnnnnnnnnnnnnnnnnnnnnnnnnnnnnnnnnnnnnnnnnnnnnnnnnnnnnnnnnnnnnnnnnnnnnnnnnnnnnnnnnnnnnnnnnnnnnnnnnnnnnnnnnnnnnnnnnnnnnnnnnnnnnnnnnnnnnnnnnnnnnnnnnnnnnnnnnnnnnnnnnnnnnnnnnnnnnnnnnnnnnnnnnnnnnnnnnnnnnnnnnnnnnnnnnnnnnnnnnnnnnnnnnnnnnnnnnnnnnnnnnnnnnnnnnnnnnnnnnnnnnnnnnnnnnnnnnnnnnnnnnnnnnnnnnnnnnnnnnnnnnnnnnnnnnnnnnnnnnnnnnnnnnnnnnnnnnnnnnnnnnnnnnnnnnnnnnnnnnnnnnnnnnnnnnnnnnnnnnnnnnnnnnnnnnnnnnnnnnnnnnnnnnnnnnnnnnnnnnnnnnnnnnnnnnnnnnnnnnnnnnnnnnnnnnnnnnnnnnnnnnnnnnnnnnnnnnnnnnnnnnnnnnnnnnnnnnnnnnnnnnnnnnnnnnnnnnnnnnnnnnnnnnnnnnnnnnnnnnnnnnnnnnnnnnnnnnnnnnnnnnnnnnnnnnnnnnnnnnnnnnnnnnnnnnnnnnnnnnnnnnnnnnnnnnnnnnnnnnnnnnnnnnnnnnnnnnnnnnnnnnnnnnnnnnnnnnnnnnnnnnnnnnnnnnnnnnnnnnnnnnnnnnnnnnnnnnnnnnnnnnnnnnnnnnnnnnnnnnnnnnnnnnnnnnnnnnnnnnnnnnnnnnnnnnnnnnnnnnnnnnnnnnnnnnnnnnnnnnnnnnnnnnnnnnnnnnnnnnnnnnnnnnnnnnnnnnnnnnnnnnnnnnnnnnnnnnnnnnnnnnnnnnnnnnnnnnnnnnnnnnnnnnnnnnnnnnnnnnnnnnnnnnnnnnnnnnnnnnnnnnnnnnnnnnnnnnnnnnnnnnnnnnnnnnnnnnnnnnnnnnnnnnnnnnnnnnnnnnnnnnnnnnnnnnnnnnnnnnnnnnnnnnnnnnnnnnnnnnnnnnnnnnnnnnnnnnnnnnnnnnnnnnnnnnnnnnnnnnnnnnnnnnnnnnnnnnnnnnnnnnnnnnnnnnnnnnnnnnnnnnnnnnnnnnnnnnnnnnnnnnnnnnnnnnnnnnnnnnnnnnnnnnnnnnnnnnnnnnnnnnnnnnnnnnnnnnnnnnnnnnnnnnnnnnnnnnnnnnnnnnnnnnnnnnnnnnnnnnnnnnnnnnnnnnnnnnnnnnnnnnnnnnnnnnnnnnnnnnnnnnnnnnnnnnnnnnnnnnnnnnnnnnnnnnnnnnnnnnnnnnnnnnnnnnnnnnnnnnnnnnnnnnnnnnnnnnnnnnnnnnnnnnnnnnnnnnnnnnnnnnnnnnnnnnnnnnnnnnnnnnnnnnnnnnnnnnnnnnnnnnnnnnnnnnnnnnnnnnnnnnnnnnnnnnnnnnnnnnnnnnnnnnnnnnnnnnnnnnnnnnnnnnnnnnnnnnnnnnnnnnnnnnnnnnnnnnnnnnnnnnnnnnnnnnnnnnnnnnnnnnnnnnnnnnnnnnnnnnnnnnnnnnnnnnnnnnnnnnnnnnnnnnnnnnnnnnnnnnnnnnnnnnnnnnnnnnnnnnnnnnnnnnnnnnnnnnnnnnnnnnnnnnnnnnnnnnnnnnnnnnnnnnnnnnnnnnnnnnnnnnnnnnnnnnnnnnnnnnnnnnnnnnnnnnnnnnnnnnnnnnnnnnnnnnnnnnnnnnnnnnnnnnnnnnnnnnnnnnnnnnnnnnnnnnnnnnnnnnnnnnnnnnnnnnnnnnnnnnnnnnnnnnnnnnnnnnnnnnnnnnnnnnnnnnnnnnnnnnnnnnnnnnnnnnnnnnnnnnnnnnnnnnnnnnnnnnnnnnnnnnnnnnnnnnnnnnnnnnnnnnnnnnnnnnnnnnnnnnnnnnnnnnnnnnnnnnnnnnnnnnnnnnnnnnnnnnnnnnnnnnnnnnnnnnnnnnnnnnnnnnnnnnnnnnnnnnnnnnnnnnnnnnnnnnnnnnnnnnnnnnnnnnnnnnnnnnnnnnnnnnnnnnnnnnnnnnnnnnnnnnnnnnnnnnnnnnnnnnnnnnnnnnnnnnnnnnnnnnnnnnnnnnnnnnnnnnnnnnnnnnnnnnnnnnnnnnnnnnnnnnnnnnnnnnnnnnnnnnnnnnnnnnnnnnnnnnnnnnnnnnnnnnnnnnnnnnnnnnnnnnnnnnnnnnnnnnnnnnnnnnnnnnnnnnnnnnnnnnnnnnnnnnnnnnnnnnnnnnnnnnnnnnnnnnnnnnnnnnnnnnnnnnnnnnnnnnnnnnnnnnnnnnnnnnnnnnnnnnnnnnnnnnnnnnnnnnnnnnnnnnnnnnnnnnnnnnnnnnnnnnnnnnnnnnnnnnnnnnnnnnnnnnnnnnnnnnnnnnnnnnnnnnnnnnnnnnnnnnnnnnnnnnnnnnnnnnnnnnnnnnnnnnnnnnnnnnnnnnnnnnnnnnnnnnnnnnnnnnnnnnnnnnnnnnnnnnnnnnnnnnnnnnnnnnnnnnnnnnnnnnnnnnnnnnnnnnnnnnnnnnnnnnnnnnnnnnnnnnnnnnnnnnnnnnnnnnnnnnnnnnnnnnnnnnnnnnnnnnnnnnnnnnnnnnnnnnnnnnnnnnnnnnnnnnnnnnnnnnnnnnnnnnnnnnnnnnnnnnnnnnnnnnnnnnnnnnnnnnnnnnnnnnnnnnnnnnnnnnnnnnnnnnnnnnnnnnnnnnnnnnnnnnnnnnnnnnnnnnnnnnnnnnnnnnnnnnnnnnnnnnnnnnnnnnnnnnnnnnnnnnnnnnnnnnnnnnnnnnnnnnnnnnnnnnnnnnnnnnnnnnnnnnnnnnnnnnnnnnnnnnnnnnnnnnnnnnnnnnnnnnnnnnnnnnnnnnnnnnnnnnnnnnnnnnnnnnnnnnnnnnnnnnnnnnnnnnnnnnnnnnnnnnnnnnnnnnnnnnnnnnnnnnnnnnnnnnnnnnnnnnnnnnnnnnnnnnnnnnnnnnnnnnnnnnnnnnnnnnnnnnnnnnnnnnnnnnnnnnnnnnnnnnnnnnnnnnnnnnnnnnnnnnnnnnnnnnnnnnnnnnnnnnnnnnnnnnnnnnnnnnnnnnnnnnnnnnnnnnnnnnnnnnnnnnnnnnnnnnnnnnnnnnnnnnnnnnnnnnnnnnnnnnnnnnnnnnnnnnnnnnnnnnnnnnnnnnnnnnnnnnnnnnnnnnnnnnnnnnnnnnnnnnnnnnnnnnnnnnnnnnnnnnnnnnnnnnnnnnnnnnnnnnnnnnnnnnnnnnnnnnnnnnnnnnnnnnnnnnnnnnnnnnnnnnnnnnnnnnnnnnnnnnnnnnnnnnnnnnnnnnnnnnnnnnnnnnnnnnnnnnnnnnnnnnnnnnnnnnnnnnnnnnnnnnnnnnnnnnnnnnnnnnnnnnnnnnnnnnnnnnnnnnnnnnnnnnnnnnnnnnnnnnnnnnnnnnnnnnnnnnnnnnnnnnnnnnnnnnnnnnnnnnnnnnnnnnnnnnnnnnnnnnnnnnnnnnnnnnnnnnnnnnnnnnnnnnnnnnnnnnnnnnnnnnnnnnnnnnnnnnnnnnnnnnnnnnnnnnnnnnnnnnnnnnnnnnnnnnnnnnnnnnnnnnnnnnnnnnnnnnnnnnnnnnnnnnnnnnnnnnnnnnnnnnnnnnnnnnnnnnnnnnnnnnnnnnnnnnnnnnnnnnnnnnnnnnnnnnnnnnnnnnnnnnnnnnnnnnnnnnnnnnnnnnnnnnnnnnnnnnnnnnnnnnnnnnnnnnnnnnnnnnnnnnnnnnnnnnnnnnnnnnnnnnnnnnnnnnnnnnnnnnnnnnnnnnnnnnnnnnnnnnnnnnnnnnnnnnnnnnnnnnnnnnnnnnnnnnnnnnnnnnnnnnnnnnnnnnnnnnnnnnnnnnnnnnnnnnnnnnnnnnnnnnnnnnnnnnnnnnnnnnnnnnnnnnnnnnnnnnnnnnnnnnnnnnnnnnnnnnnnnnnnnnnnnnnnnnnnnnnnnnnnnnnnnnnnnnnnnnnnnnnnnnnnnnnnnnnnnnnnnnnnnnnnnnnnnnnnnnnnnnnnnnnnnnnnnnnnnnnnnnnnnnnnnnnnnnnnnnnnnnnnnnnnnnnnnnnnnnnnnnnnnnnnnnnnnnnnnnnnnnnnnnnnnnnnnnnnnnnnnnnnnnnnnnnnnnnnnnnnnnnnnnnnnnnnnnnnnnnnnnnnnnnnnnnnnnnnnnnnnnnnnnnnnnnnnnnnnnnnnnnnnnnnnnnnnnnnnnnnnnnnnnnnnnnnnnnnnnnnnnnnnnnnnnnnnnnnnnnnnnnnnnnnnnnnnnnnnnnnnnnnnnnnnnnnnnnnnnnnnnnnnnnnnnnnnnnnnnnnnnnnnnnnnnnnnnnnnnnnnnnnnnnnnnnnnnnnnnnnnnnnnnnnnnnnnnnnnnnnnnnnnnnnnnnnnnnnnnnnnnnnnnnnnnnnnnnnnnnnnnnnnnnnnnnnnnnnnnnnnnnnnnnnnnnnnnnnnnnnnnnnnnnnnnnnnnnnnnnnnnnnnnnnnnnnnnnnnnnnnnnnnnnnnnnnnnnnnnnnnnnnnnnnnnnnnnnnnnnnnnnnnnnnnnnnnnnnnnnnnnnnnnnnnnnnnnnnnnnnnnnnnnnnnnnnnnnnnnnnnnnnnnnnnnnnnnnnnnnnnnnnnnnnnnnnnnnnnnnnnnnnnnnnnnnnnnnnnnnnnnnnnnnnnnnnnnnnnnnnnnnnnnnnnnnnnnnnnnnnnnnnnnnnnnnnnnnnnnnnnnnnnnnnnnnnnnnnnnnnnnnnnnnnnnnnnnnnnnnnnnnnnnnnnnnnnnnnnnnnnnnnnnnnnnnnnnnnnnnnnnnnnnnnnnnnnnnnnnnnnnnnnnnnnnnnnnnnnnnnnnnnnnnnnnnnnnnnnnnnnnnnnnnnnnnnnnnnnnnnnnnnnnnnnnnnnnnnnnnnnnnnnnnnnnnnnnnnnnnnnnnnnnnnnnnnnnnnnnnnnnnnnnnnnnnnnnnnnnnnnnnnnnnnnnnnnnnnnnnnnnnnnnnnnnnnnnnnnnnnnnnnnnnnnnnnnnnnnnnnnnnnnnnnnnnnnnnnnnnnnnnnnnnnnnnnnnnnnnnnnnnnnnnnnnnnnnnnnnnnnnnnnnnnnnnnnnnnnnnnnnnnnnnnnnnnnnnnnnnnnnnnnnnnnnnnnnnnnnnnnnnnnnnnnnnnnnnnnnnnnnnnnnnnnnnnnnnnnnnnnnnnnnnnnnnnnnnnnnnnnnnnnnnnnnnnnnnnnnnnnnnnnnnnnnnnnnnnnnnnnnnnnnnnnnnnnnnnnnnnnnnnnnnnnnnnnnnnnnnnnnnnnnnnnnnnnnnnnnnnnnnnnnnnnnnnnnnnnnnnnnnnnnnnnnnnnnnnnnnnnnnnnnnnnnnnnnnnnnnnnnnnnnnnnnnnnnnnnnnnnnnnnnnnnnnnnnnnnnnnnnnnnnnnnnnnnnnnnnnnnnnnnnnnnnnnnnnnnnnnnnnnnnnnnnnnnnnnnnnnnnnnnnnnnnnnnnnnnnnnnnnnnnnnnnnnnnnnnnnnnnnnnnnnnnnnnnnnnnnnnnnnnnnnnnnnnnnnnnnnnnnnnnnnnnnnnnnnnnnnnnnnnnnnnnnnnnnnnnnnnnnnnnnnnnnnnnnnnnnnnnnnnnnnnnnnnnnnnnnnnnnnnnnnnnnnnnnnnnnnnnnnnnnnnnnnnnnnnnnnnnnnnnnnnnnnnnnnnnnnnnnnnnnnnnnnnnnnnnnnnnnnnnnnnnnnnnnnnnnnnnnnnnnnnnnnnnnnnnnnnnnnnnnnnnnnnnnnnnnnnnnnnnnnnnnnnnnnnnnnnnnnnnnnnnnnnnnnnnnnnnnnnnnnnnnnnnnnnnnnnnnnnnnnnnnnnnnnnnnnnnnnnnnnnnnnnnnnnnnnnnnnnnnnnnnnnnnnnnnnnnnnnnnnnnnnnnnnnnnnnnnnnnnnnnnnnnnnnnnnnnnnnnnnnnnnnnnnnnnnnnnnnnnnnnnnnnnnnnnnnnnnnnnnnnnnnnnnnnnnnnnnnnnnnnnnnnnnnnnnnnnnnnnnnnnnnnnnnnnnnnnnnnnnnnnnnnnnnnnnnnnnnnnnnnnnnnnnnnnnnnnnnnnnnnnnnnnnnnnnnnnnnnnnnnnnnnnnnnnnnnnnnnnnnnnnnnnnnnnnnnnnnnnnnnnnnnnnnnnnnnnnnnnnnnnnnnnnnnnnnnnnnnnnnnnnnnnnnnnnnnnnnnnnnnnnnnnnnnnnnnnnnnnnnnnnnnnnnnnnnnnnnnnnnnnnnnnnnnnnnnnnnnnnnnnnnnnnnnnnnnnnnnnnnnnnnnnnnnnnnnnnnnnnnnnnnnnnnnnnnnnnnnnnnnnnnnnnnnnnnnnnnnnnnnnnnnnnnnnnnnnnnnnnnnnnnnnnnnnnnnnnnnnnnnnnnnnnnnnnnnnnnnnnnnnnnnnnnnnnnnnnnnnnnnnnnnnnnnnnnnnnnnnnnnnnnnnnnnnnnnnnnnnnnnnnnnnnnnnnnnnnnnnnnnnnnnnnnnnnnnnnnnnnnnnnnnnnnnnnnnnnnnnnnnnnnnnnnnnnnnnnnnnnnnnnnnnnnnnnnnnnnnnnnnnnnnnnnnnnnnnnnnnnnnnnnnnnnnnnnnnnnnnnnnnnnnnnnnnnnnnnnnnnnnnnnnnnnnnnnnnnnnnnnnnnnnnnnnnnnnnnnnnnnnnnnnnnnnnnnnnnnnnnnnnnnnnnnnnnnnnnnnnnnnnnnnnnnnnnnnnnnnnnnnnnnnnnnnnnnnnnnnnnnnnnnnnnnnnnnnnnnnnnnnnnnnnnnnnnnnnnnnnnnnnnnnnnnnnnnnnnnnnnnnnnnnnnnnnnnnnnnnnnnnnnnnnnnnnnnnnnnnnnnnnnnnnnnnnnnnnnnnnnnnnnnnnnnnnnnnnnnnnnnnnnnnnnnnnnnnnnnnnnnnnnnnnnnnnnnnnnnnnnnnnnnnnnnnnnnnnnnnnnnnnnnnnnnnnnnnnnnnnnnnnnnnnnnnnnnnnnnnnnnnnnnnnnnnnnnnnnnnnnnnnnnnnnnnnnnnnnnnnnnnnnnnnnnnnnnnnnnnnnnnnnnnnnnnnnnnnnnnnnnnnnnnnnnnnnnnnnnnnnnnnnnnnnnnnnnnnnnnnnnnnnnnnnnnnnnnnnnnnnnnnnnnnnnnnnnnnnnnnnnnnnnnnnnnnnnnnnnnnnnnnnnnnnnnnnnnnnnnnnnnnnnnnnnnnnnnnnnnnnnnnnnnnnnnnnnnnnnnnnnnnnnnnnnnnnnnnnnnnnnnnnnnnnnnnnnnnnnnnnnnnnnnnnnnnnnnnnnnnnnnnnnnnnnnnnnnnnnnnnnnnnnnnnnnnnnnnnnnnnnnnnnnnnnnnnnnnnnnnnnnnnnnnnnnnnnnnnnnnnnnnnnnnnnnnnnnnnnnnnnnnnnnnnnnnnnnnnnnnnnnnnnnnnnnnnnnnnnnnnnnnnnnnnnnnnnnnnnnnnnnnnnnnnnnnnnnnnnnnnnnnnnnnnnnnnnnnnnnnnnnnnnnnnnnnnnnnnnnnnnnnnnnnnnnnnnnnnnnnnnnnnnnnnnnnnnnnnnnnnnnnnnnnnnnnnnnnnnnnnnnnnnnnnnnnnnnnnnnnnnnnnnnnnnnnnnnnnnnnnnnnnnnnnnnnnnnnnnnnnnnnnnnnnnnnnnnnnnnnnnnnnnnnnnnnnnnnnnnnnnnnnnnnnnnnnnnnnnnnnnnnnnnnnnnnnnnnnnnnnnnnnnnnnnnnnnnnnnnnnnnnnnnnnnnnnnnnnnnnnnnnnnnnnnnnnnnnnnnnnnnnnnnnnnnnnnnnnnnnnnnnnnnnnnnnnnnnnnnnnnnnnnnnnnnnnnnnnnnnnnnnnnnnnnnnnnnnnnnnnnnnnnnnnnnnnnnnnnnnnnnnnnnnnnnnnnnnnnnnnnnnnnnnnnnnnnnnnnnnnnnnnnnnnnnnnnnnnnnnnnnnnnnnnnnnnnnnnnnnnnnnnnnnnnnnnnnnnnnnnnnnnnnnnnnnnnnnnnnnnnnnnnnnnnnnnnnnnnnnnnnnnnnnnnnnnnnnnnnnnnnnnnnnnnnnnnnnnnnnnnnnnnnnnnnnnnnnnnnnnnnnnnnnnnnnnnnnnnnnnnnnnnnnnnnnnnnnnnnnnnnnnnnnnnnnnnnnnnnnnnnnnnnnnnnnnnnnnnnnnnnnnnnnnnnnnnnnnnnnnnnnnnnnnnnnnnnnnnnnnnnnnnnnnnnnnnnnnnnnnnnnnnnnnnnnnnnnnnnnnnnnnnnnnnnnnnnnnnnnnnnnnnnnnnnnnnnnnnnnnnnnnnnnnnnnnnnnnnnnnnnnnnnnnnnnnnnnnnnnnnnnnnnnnnnnnnnnnnnnnnnnnnnnnnnnnnnnnnnnnnnnnnnnnnnnnnnnnnnnnnnnnnnnnnnnnnnnnnnnnnnnnnnnnnnnnnnnnnnnnnnnnnnnnnnnnnnnnnnnnnnnnnnnnnnnnnnnnnnnnnnnnnnnnnnnnnnnnnnnnnnnnnnnnnnnnnnnnnnnnnnnnnnnnnnnnnnnnnnnnnnnnnnnnnnnnnnnnnnnnnnnnnnnnnnnnnnnnnnnnnnnnnnnnnnnnnnnnnnnnnnnnnnnnnnnnnnnnnnnnnnnnnnnnnnnnnnnnnnnnnnnnnnnnnnnnnnnnnnnnnnnnnnnnnnnnnnnnnnnnnnnnnnnnnnnnnnnnnnnnnnnnnnnnnnnnnnnnnnnnnnnnnnnnnnnnnnnnnnnnnnnnnnnnnnnnnnnnnnnnnnnnnnnnnnnnnnnnnnnnnnnnnnnnnnnnnnnnnnnnnnnnnnnnnnnnnnnnnnnnnnnnnnnnnnnnnnnnnnnnnnnnnnnnnnnnnnnnnnnnnnnnnnnnnnnnnnnnnnnnnnnnnnnnnnnnnnnnnnnnnnnnnnnnnnnnnnnnnnnnnnnnnnnnnnnnnnnnnnnnnnnnnnnnnnnnnnnnnnnnnnnnnnnnnnnnnnnnnnnnnnnnnnnnnnnnnnnnnnnnnnnnnnnnnnnnnnnnnnnnnnnnnnnnnnnnnnnnnnnnnnnnnnnnnnnnnnnnnnnnnnnnnnnnnnnnnnnnnnnnnnnnnnnnnnnnnnnnnnnnnnnnnnnnnnnnnnnnnnnnnnnnnnnnnnnnnnnnnnnnnnnnnnnnnnnnnnnnnnnnnnnnnnnnnnnnnnnnnnnnnnnnnnnnnnnnnnnnnnnnnnnnnnnnnnnnnnnnnnnnnnnnnnnnnnnnnnnnnnnnnnnnnnnnnnnnnnnnnnnnnnnnnnnnnnnnnnnnnnnnnnnnnnnnnnnnnnnnnnnnnnnnnnnnnnnnnnnnnnnnnnnnnnnnnnnnnnnnnnnnnnnnnnnnnnnnnnnnnnnnnnnnnnnnnnnnnnnnnnnnnnnnnnnnnnnnnnnnnnnnnnnnnnnnnnnnnnnnnnnnnnnnnnnnnnnnnnnnnnnnnnnnnnnnnnnnnnnnnnnnnnnnnnnnnnnnnnnnnnnnnnnnnnnnnnnnnnnnnnnnnnnnnnnnnnnnnnnnnnnnnnnnnnnnnnnnnnnnnnnnnnnnnnnnnnnnnnnnnnnnnnnnnnnnnnnnnnnnnnnnnnnnnnnnnnnnnnnnnnnnnnnnnnnnnnnnnnnnnnnnnnnnnnnnnnnnnnnnnnnnnnnnnnnnnnnnnnnnnnnnnnnnnnnnnnnnnnnnnnnnnnnnnnnnnnnnnnnnnnnnnnnnnnnnnnnnnnnnnnnnnnnnnnnnnnnnnnnnnnnnnnnnnnnnnnnnnnnnnnnnnnnnnnnnnnnnnnnnnnnnnnnnnnnnnnnnnnnnnnnnnnnnnnnnnnnnnnnnnnnnnnnnnnnnnnnnnnnnnnnnnnnnnnnnnnnnnnnnnnnnnnnnnnnnnnnnnnnnnnnnnnnnnnnnnnnnnnnnnnnnnnnnnnnnnnnnnnnnnnnnnnnnnnnnnnnnnnnnnnnnnnnnnnnnnnnnnnnnnnnnnnnnnnnnnnnnnnnnnnnnnnnnnnnnnnnnnnnnnnnnnnnnnnnnnnnnnnnnnnnnnnnnnnnnnnnnnnnnnnnnnnnnnnnnnnnnnnnnnnnnnnnnnnnnnnnnnnnnnnnnnnnnnnnnnnnnnnnnnnnnnnnnnnnnnnnnnnnnnnnnnnnnnnnnnnnnnnnnnnnnnnnnnnnnnnnnnnnnnnnnnnnnnnnnnnnnnnnnnnnnnnnnnnnnnnnnnnnnnnnnnnnnnnnnnnnnnnnnnnnnnnnnnnnnnnnnnnnnnnnnnnnnnnnnnnnnnnnnnnnnnnnnnnnnnnnnnnnnnnnnnnnnnnnnnnnnnnnnnnnnnnnnnnnnnnnnnnnnnnnnnnnnnnnnnnnnnnnnnnnnnnnnnnnnnnnnnnnnnnnnnnnnnnnnnnnnnnnnnnnnnnnnnnnnnnnnnnnnnnnnnnnnnnnnnnnnnnnnnnnnnnnnnnnnnnnnnnnnnnnnnnnnnnnnnnnnnnnnnnnnnnnnnnnnnnnnnnnnnnnnnnnnnnnnnnnnnnnnnnnnnnnnnnnnnnnnnnnnnnnnnnnnnnnnnnnnnnnnnnnnnnnnnnnnnnnnnnnnnnnnnnnnnnnnnnnnnnnnnnnnnnnnnnnnnnnnnnnnnnnnnnnnnnnnnnnnnnnnnnnnnnnnnnnnnnnnnnnnnnnnnnnnnnnnnnnnnnnnnnnnnnnnnnnnnnnnnnnnnnnnnnnnnnnnnnnnnnnnnnnnnnnnnnnnnnnnnnnnnnnnnnnnnnnnnnnnnnnnnnnnnnnnnnnnnnnnnnnnnnnnnnnnnnnnnnnnnnnnnnnnnnnnnnnnnnnnnnnnnnnnnnnnnnnnnnnnnnnnnnnnnnnnnnnnnnnnnnnnnnnnnnnnnnnnnnnnnnnnnnnnnnnnnnnnnnnnnnnnnnnnnnnnnnnnnnnnnnnnnnnnnnnnnnnnnnnnnnnnnnnnnnnnnnnnnnnnnnnnnnnnnnnnnnnnnnnnnnnnnnnnnnnnnnnnnnnnnnnnnnnnnnnnnnnnnnnnnnnnnnnnnnnnnnnnnnnnnnnnnnnnnnnnnnnnnnnnnnnnnnnnnnnnnnnnnnnnnnnnnnnnnnnnnnnnnnnnnnnnnnnnnnnnnnnnnnnnnnnnnnnnnnnnnnnnnnnnnnnnnnnnnnnnnnnnnnnnnnnnnnnnnnnnnnnnnnnnnnnnnnnnnnnnnnnnnnnnnnnnnnnnnnnnnnnnnnnnnnnnnnnnnnnnnnnnnnnnnnnnnnnnnnnnnnnnnnnnnnnnnnnnnnnnnnnnnnnnnnnnnnnnnnnnnnnnnnnnnnnnnnnnnnnnnnnnnnnnnnnnnnnnnnnnnnnnnnnnnnnnnnnnnnnnnnnnnnnnnnnnnnnnnnnnnnnnnnnnnnnnnnnnnnnnnnnnnnnnnnnnnnnnnnnnnnnnnnnnnnnnnnnnnnnnnnnnnnnnnnnnnnnnnnnnnnnnnnnnnnnnnnnnnnnnnnnnnnnnnnnnnnnnnnnnnnnnnnnnnnnnnnnnnnnnnnnnnnnnnnnnnnnnnnnnnnnnnnnnnnnnnnnnnnnnnnnnnnnnnnnnnnnnnnnnnnnnnnnnnnnnnnnnnnnnnnnnnnnnnnnnnnnnnnnnnnnnnnnnnnnnnnnnnnnnnnnnnnnnnnnnnnnnnnnnnnnnnnnnnnnnnnnnnnnnnnnnnnnnnnnnnnnnnnnnnnnnnnnnnnnnnnnnnnnnnnnnnnnnnnnnnnnnnnnnnnnnnnnnnnnnnnnnnnnnnnnnnnnnnnnnnnnnnnnnnnnnnnnnnnnnnnnnnnnnnnnnnnnnnnnnnnnnnnnnnnnnnnnnnnnnnnnnnnnnnnnnnnnnnnnnnnnnnnnnnnnnnnnnnnnnnnnnnnnnnnnnnnnnnnnnnnnnnnnnnnnnnnnnnnnnnnnnnnnnnnnnnnnnnnnnnnnnnnnnnnnnnnnnnnnnnnnnnnnnnnnnnnnnnnnnnnnnnnnnnnnnnnnnnnnnnnnnnnnnnnnnnnnnnnnnnnnnnnnnnnnnnnnnnnnnnnnnnnnnnnnnnnnnnnnnnnnnnnnnnnnnnnnnnnnnnnnnnnnnnnnnnnnnnnnnnnnnnnnnnnnnnnnnnnnnnnnnnnnnnnnnnnnnnnnnnnnnnnnnnnnnnnnnnnnnnnnnnnnnnnnnnnnnnnnnnnnnnnnnnnnnnnnnnnnnnnnnnnnnnnnnnnnnnnnnnnnnnnnnnnnnnnnnnnnnnnnnnnnnnnnnnnnnnnnnnnnnnnnnnnnnnnnnnnnnnnnnnnnnnnnnnnnnnnnnnnnnnnnnnnnnnnnnnnnnnnnnnnnnnnnnnnnnnnnnnnnnnnnnnnnnnnnnnnnnnnnnnnnnnnnnnnnnnnnnnnnnnnnnnnnnnnnnnnnnnnnnnnnnnnnnnnnnnnnnnnnnnnnnnnnnnnnnnnnnnnnnnnnnnnnnnnnnnnnnnnnnnnnnnnnnnnnnnnnnnnnnnnnnnnnnnnnnnnnnnnnnnnnnnnnnnnnnnnnnnnnnnnnnnnnnnnnnnnnnnnnnnnnnnnnnnnnnnnnnnnnnnnnnnnnnnnnnnnnnnnnnnnnnnnnnnnnnnnnnnnnnnnnnnnnnnnnnnnnnnnnnnnnnnnnnnnnnnnnnnnnnnnnnnnnnnnnnnnnnnnnnnnnnnnnnnnnnnnnnnnnnnnnnnnnnnnnnnnnnnnnnnnnnnnnnnnnnnnnnnnnnnnnnnnnnnnnnnnnnnnnnnnnnnnnnnnnnnnnnnnnnnnnnnnnnnnnnnnnnnnnnnnnnnnnnnnnnnnnnnnnnnnnnnnnnnnnnnnnnnnnnnnnnnnnnnnnnnnnnnnnnnnnnnnnnnnnnnnnnnnnnnnnnnnnnnnnnnnnnnnnnnnnnnnnnnnnnnnnnnnnnnnnnnnnnnnnnnnnnnnnnnnnnnnnnnnnnnnnnnnnnnnnnnnnnnnnnnnnnnnnnnnnnnnnnnnnnnnnnnnnnnnnnnnnnnnnnnnnnnnnnnnnnnnnnnnnnnnnnnnnnnnnnnnnnnnnnnnnnnnnnnnnnnnnnnnnnnnnnnnnnnnnnnnnnnnnnnnnnnnnnnnnnnnnnnnnnnnnnnnnnnnnnnnnnnnnnnnnnnnnnnnnnnnnnnnnnnnnnnnnnnnnnnnnnnnnnnnnnnnnnnnnnnnnnnnnnnnnnnnnnnnnnnnnnnnnnnnnnnnnnnnnnnnnnnnnnnnnnnnnnnnnnnnnnnnnnnnnnnnnnnnnnnnnnnnnnnnnnnnnnnnnnnnnnnnnnnnnnnnnnnnnnnnnnnnnnnnnnnnnnnnnnnnnnnnnnnnnnnnnnnnnnnnnnnnnnnnnnnnnnnnnnnnnnnnnnnnnnnnnnnnnnnnnnnnnnnnnnnnnnnnnnnnnnnnnnnnnnnnnnnnnnnnnnnnnnnnnnnnnnnnnnnnnnnnnnnnnnnnnnnnnnnnnnnnnnnnnnnnnnnnnnnnnnnnnnnnnnnnnnnnnnnnnnnnnnnnnnnnnnnnnnnnnnnnnnnnnnnnnnnnnnnnnnnnnnnnnnnnnnnnnnnnnnnnnnnnnnnnnnnnnnnnnnnnnnnnnnnnnnnnnnnnnnnnnnnnnnnnnnnnnnnnnnnnnnnnnnnnnnnnnnnnnnnnnnnnnnnnnnnnnnnnnnnnnnnnnnnnnnnnnnnnnnnnnnnnnnnnnnnnnnnnnnnnnnnnnnnnnnnnnnnnnnnnnnnnnnnnnnnnnnnnnnnnnnnnnnnnnnnnnnnnnnnnnnnnnnnnnnnnnnnnnnnnnnnnnnnnnnnnnnnnnnnnnnnnnnnnnnnnnnnnnnnnnnnnnnnnnnnnnnnnnnnnnnnnnnnnnnnnnnnnnnnnnnnnnnnnnnnnnnnnnnnnnnnnnnnnnnnnnnnnnnnnnnnnnnnnnnnnnnnnnnnnnnnnnnnnnnnnnnnnnnnnnnnnnnnnnnnnnnnnnnnnnnnnnnnnnnnnnnnnnnnnnnnnnnnnnnnnnnnnnnnnnnnnnnnnnnnnnnnnnnnnnnnnnnnnnnnnnnnnnnnnnnnnnnnnnnnnnnnnnnnnnnnnnnnnnnnnnnnnnnnnnnnnnnnnnnnnnnnnnnnnnnnnnnnnnnnnnnnnnnnnnnnnnnnnnnnnnnnnnnnnnnnnnnnnnnnnnnnnnnnnnnnnnnnnnnnnnnnnnnnnnnnnnnnnnnnnnnnnnnnnnnnnnnnnnnnnnnnnnnnnnnnnnnnnnnnnnnnnnnnnnnnnnnnnnnnnnnnnnnnnnnnnnnnnnnnnnnnnnnnnnnnnnnnnnnnnnnnnnnnnnnnnnnnnnnnnnnnnnnnnnnnnnnnnnnnnnnnnnnnnnnnnnnnnnnnnnnnnnnnnnnnnnnnnnnnnnnnnnnnnnnnnnnnnnnnnnnnnnnnnnnnnnnnnnnnnnnnnnnnnnnnnnnnnnnnnnnnnnnnnnnnnnnnnnnnnnnnnnnnnnnnnnnnnnnnnnnnnnnnnnnnnnnnnnnnnnnnnnnnnnnnnnnnnnnnnnnnnnnnnnnnnnnnnnnnnnnnnnnnnnnnnnnnnnnnnnnnnnnnnnnnnnnnnnnnnnnnnnnnnnnnnnnnnnnnnnnnnnnnnnnnnnnnnnnnnnnnnnnnnnnnnnnnnnnnnnnnnnnnnnnnnnnnnnnnnnnnnnnnnnnnnnnnnnnnnnnnnnnnnnnnnnnnnnnnnnnnnnnnnnnnnnnnnnnnnnnnnnnnnnnnnnnnnnnnnnnnnnnnnnnnnnnnnnnnnnnnnnnnnnnnnnnnnnnnnnnnnnnnnnnnnnnnnnnnnnnnnnnnnnnnnnnnnnnnnnnnnnnnnnnnnnnnnnnnnnnnnnnnnnnnnnnnnnnnnnnnnnnnnnnnnnnnnnnnnnnnnnnnnnnnnnnnnnnnnnnnnnnnnnnnnnnnnnnnnnnnnnnnnnnnnnnnnnnnnnnnnnnnnnnnnnnnnnnnnnnnnnnnnnnnnnnnnnnnnnnnnnnnnnnnnnnnnnnnnnnnnnnnnnnnnnnnnnnnnnnnnnnnnnnnnnnnnnnnnnnnnnnnnnnnnnnnnnnnnnnnnnnnnnnnnnnnnnnnnnnnnnnnnnnnnnnnnnnnnnnnnnnnnnnnnnnnnnnnnnnnnnnnnnnnnnnnnnnnnnnnnnnnnnnnnnnnnnnnnnnnnnnnnnnnnnnnnnnnnnnnnnnnnnnnnnnnnnnnnnnnnnnnnnnnnnnnnnnnnnnnnnnnnnnnnnnnnnnnnnnnnnnnnnnnnnnnnnnnnnnnnnnnnnnnnnnnnnnnnnnnnnnnnnnnnnnnnnnnnnnnnnnnnnnnnnnnnnnnnnnnnnnnnnnnnnnnnnnnnnnnnnnnnnnnnnnnnnnnnnnnnnnnnnnnnnnnnnnnnnnnnnnnnnnnnnnnnnnnnnnnnnnnnnnnnnnnnnnnnnnnnnnnnnnnnnnnnnnnnnnnnnnnnnnnnnnnnnnnnnnnnnnnnnnnnnnnnnnnnnnnnnnnnnnnnnnnnnnnnnnnnnnnnnnnnnnnnnnnnnnnnnnnnnnnnnnnnnnnnnnnnnnnnnnnnnnnnnnnnnnnnnnnnnnnnnnnnnnnnnnnnnnnnnnnnnnnnnnnnnnnnnnnnnnnnnnnnnnnnnnnnnnnnnnnnnnnnnnnnnnnnnnnnnnnnnnnnnnnnnnnnnnnnnnnnnnnnnnnnnnnnnnnnnnnnnnnnnnnnnnnnnnnnnnnnnnnnnnnnnnnnnnnnnnnnnnnnnnnnnnnnnnnnnnnnnnnnnnnnnnnnnnnnnnnnnnnnnnnnnnnnnnnnnnnnnnnnnnnnnnnnnnnnnnnnnnnnnnnnnnnnnnnnnnnnnnnnnnnnnnnnnnnnnnnnnnnnnnnnnnnnnnnnnnnnnnnnnnnnnnnnnnnnnnnnnnnnnnnnnnnnnnnnnnnnnnnnnnnnnnnnnnnnnnnnnnnnnnnnnnnnnnnnnnnnnnnnnnnnnnnnnnnnnnnnnnnnnnnnnnnnnnnnnnnnnnnnnnnnnnnnnnnnnnnnnnnnnnnnnnnnnnnnnnnnnnnnnnnnnnnnnnnnnnnnnnnnnnnnnnnnnnnnnnnnnnnnnnnnnnnnnnnnnnnnnnnnnnnnnnnnnnnnnnnnnnnnnnnnnnnnnnnnnnnnnnnnnnnnnnnnnnnnnnnnnnnnnnnnnnnnnnnnnnnnnnnnnnnnnnnnnnnnnnnnnnnnnnnnnnnnnnnnnnnnnnnnnnnnnnnnnnnnnnnnnnnnnnnnnnnnnnnnnnnnnnnnnnnnnnnnnnnnnnnnnnnnnnnnnnnnnnnnnnnnnnnnnnnnnnnnnnnnnnnnnnnnnnnnnnnnnnnnnnnnnnnnnnnnnnnnnnnnnnnnnnnnnnnnnnnnnnnnnnnnnnnnnnnnnnnnnnnnnnnnnnnnnnnnnnnnnnnnnnnnnnnnnnnnnnnnnnnnnnnnnnnnnnnnnnnnnnnnnnnnnnnnnnnnnnnnnnnnnnnnnnnnnnnnnnnnnnnnnnnnnnnnnnnnnnnnnnnnnnnnnnnnnnnnnnnnnnnnnnnnnnnnnnnnnnnnnnnnnnnnnnnnnnnnnnnnnnnnnnnnnnnnnnnnnnnnnnnnnnnnnnnnnnnnnnnnnnnnnnnnnnnnnnnnnnnnnnnnnnnnnnnnnnnnnnnnnnnnnnnnnnnnnnnnnnnnnnnnnnnnnnnnnnnnnnnnnnnnnnnnnnnnnnnnnnnnnnnnnnnnnnnnnnnnnnnnnnnnnnnnnnnnnnnnnnnnnnnnnnnnnnnnnnnnnnnnnnnnnnnnnnnnnnnnnnnnnnnnnnnnnnnnnnnnnnnnnnnnnnnnnnnnnnnnnnnnnnnnnnnnnnnnnnnnnnnnnnnnnnnnnnnnnnnnnnnnnnnnnnnnnnnnnnnnnnnnnnnnnnnnnnnnnnnnnnnnnnnnnnnnnnnnnnnnnnnnnnnnnnnnnnnnnnnnnnnnnnnnnnnnnnnnnnnnnnnnnnnnnnnnnnnnnnnnnnnnnnnnnnnnnnnnnnnnnnnnnnnnnnnnnnnnnnnnnnnnnnnnnnnnnnnnnnnnnnnnnnnnnnnnnnnnnnnnnnnnnnnnnnnnnnnnnnnnnnnnnnnnnnnnnnnnnnnnnnnnnnnnnnnnnnnnnnnnnnnnnnnnnnnnnnnnnnnnnnnnnnnnnnnnnnnnnnnnnnnnnnnnnnnnnnnnnnnnnnnnnnnnnnnnnnnnnnnnnnnnnnnnnnnnnnnnnnnnnnnnnnnnnnnnnnnnnnnnnnnnnnnnnnnnnnnnnnnnnnnnnnnnnnnnnnnnnnnnnnnnnnnnnnnnnnnnnnnnnnnnnnnnnnnnnnnnnnnnnnnnnnnnnnnnnnnnnnnnnnnnnnnnnnnnnnnnnnnnnnnnnnnnnnnnnnnnnnnnnnnnnnnnnnnnnnnnnnnnnnnnnnnnnnnnnnnnnnnnnnnnnnnnnnnnnnnnnnnnnnnnnnnnnnnnnnnnnnnnnnnnnnnnnnnnnnnnnnnnnnnnnnnnnnnnnnnnnnnnnnnnnnnnnnnnnnnnnnnnnnnnnnnnnnnnnnnnnnnnnnnnnnnnnnnnnnnnnnnnnnnnnnnnnnnnnnnnnnnnnnnnnnnnnnnnnnnnnnnnnnnnnnnnnnnnnnnnnnnnnnnnnnnnnnnnnnnnnnnnnnnnnnnnnnnnnnnnnnnnnnnnnnnnnnnnnnnnnnnnnnnnnnnnnnnnnnnnnnnnnnnnnnnnnnnnnnnnnnnnnnnnnnnnnnnnnnnnnnnnnnnnnnnnnnnnnnnnnnnnnnnnnnnnnnnnnnnnnnnnnnnnnnnnnnnnnnnnnnnnnnnnnnnnnnnnnnnnnnnnnnnnnnnnnnnnnnnnnnnnnnnnnnnnnnnnnnnnnnnnnnnnnnnnnnnnnnnnnnnnnnnnnnnnnnnnnnnnnnnnnnnnnnnnnnnnnnnnnnnnnnnnnnnnnnnnnnnnnnnnnnnnnnnnnnnnnnnnnnnnnnnnnnnnnnnnnnnnnnnnnnnnnnnnnnnnnnnnnnnnnnnnnnnnnnnnnnnnnnnnnnnnnnnnnnnnnnnnnnnnnnnnnnnnnnnnnnnnnnnnnnnnnnnnnnnnnnnnnnnnnnnnnnnnnnnnnnnnnnnnnnnnnnnnnnnnnnnnnnnnnnnnnnnnnnnnnnnnnnnnnnnnnnnnnnnnnnnnnnnnnnnnnnnnnnnnnnnnnnnnnnnnnnnnnnnnnnnnnnnnnnnnnnnnnnnnnnnnnnnnnnnnnnnnnnnnnnnnnnnnnnnnnnnnnnnnnnnnnnnnnnnnnnnnnnnnnnnnnnnnnnnnnnnnnnnnnnnnnnnnnnnnnnnnnnnnnnnnnnnnnnnnnnnnnnnnnnnnnnnnnnnnnnnnnnnnnnnnnnnnnnnnnnnnnnnnnnnnnnnnnnnnnnnnnnnnnnnnnnnnnnnnnnnnnnnnnnnnnnnnnnnnnnnnnnnnnnnnnnnnnnnnnnnnnnnnnnnnnnnnnnnnnnnnnnnnnnnnnnnnnnnnnnnnnnnnnnnnnnnnnnnnnnnnnnnnnnnnnnnnnnnnnnnnnnnnnnnnnnnnnnnnnnnnnnnnnnnnnnnnnnnnnnnnnnnnnnnnnnnnnnnnnnnnnnnnnnnnnnnnnnnnnnnnnnnnnnnnnnnnnnnnnnnnnnnnnnnnnnnnnnnnnnnnnnnnnnnnnnnnnnnnnnnnnnnnnnnnnnnnnnnnnnnnnnnnnnnnnnnnnnnnnnnnnnnnnnnnnnnnnnnnnnnnnnnnnnnnnnnnnnnnnnnnnnnnnnnnnnnnnnnnnnnnnnnnnnnnnnnnnnnnnnnnnnnnnnnnnnnnnnnnnnnnnnnnnnnnnnnnnnnnnnnnnnnnnnnnnnnnnnnnnnnnnnnnnnnnnnnnnnnnnnnnnnnnnnnnnnnnnnnnnnnnnnnnnnnnnnnnnnnnnnnnnnnnnnnnnnnnnnnnnnnnnnnnnnnnnnnnnnnnnnnnnnnnnnnnnnnnnnnnnnnnnnnnnnnnnnnnnnnnnnnnnnnnnnnnnnnnnnnnnnnnnnnnnnnnnnnnnnnnnnnnnnnnnnnnnnnnnnnnnnnnnnnnnnnnnnnnnnnnnnnnnnnnnnnnnnnnnnnnnnnnnnnnnnnnnnnnnnnnnnnnnnnnnnnnnnnnnnnnnnnnnnnnnnnnnnnnnnnnnnnnnnnnnnnnnnnnnnnnnnnnnnnnnnnnnnnnnnnnnnnnnnnnnnnnnnnnnnnnnnnnnnnnnnnnnnnnnnnnnnnnnnnnnnnnnnnnnnnnnnnnnnnnnnnnnnnnnnnnnnnnnnnnnnnnnnnnnnnnnnnnnnnnnnnnnnnnnnnnnnnnnnnnnnnnnnnnnnnnnnnnnnnnnnnnnnnnnnnnnnnnnnnnnnnnnnnnnnnnnnnnnnnnnnnnnnnnnnnnnnnnnnnnnnnnnnnnnnnnnnnnnnnnnnnnnnnnnnnnnnnnnnnnnnnnnnnnnnnnnnnnnnnnnnnnnnnnnnnnnnnnnnnnnnnnnnnnnnnnnnnnnnnnnnnnnnnnnnnnnnnnnnnnnnnnnnnnnnnnnnnnnnnnnnnnnnnnnnnnnnnnnnnnnnnnnnnnnnnnnnnnnnnnnnnnnnnnnnnnnnnnnnnnnnnnnnnnnnnnnnnnnnnnnnnnnnnnnnnnnnnnnnnnnnnnnnnnnnnnnnnnnnnnnnnnnnnnnnnnnnnnnnnnnnnnnnnnnnnnnnnnnnnnnnnnnnnnnnnnnnnnnnnnnnnnnnnnnnnnnnnnnnnnnnnnnnnnnnnnnnnnnnnnnnnnnnnnnnnnnnnnnnnnnnnnnnnnnnnnnnnnnnnnnnnnnnnnnnnnnnnnnnnnnnnnnnnnnnnnnnnnnnnnnnnnnnnnnnnnnnnnnnnnnnnnnnnnnnnnnnnnnnnnnnnnnnnnnnnnnnnnnnnnnnnnnnnnnnnnnnnnnnnnnnnnnnnnnnnnnnnnnnnnnnnnnnnnnnnnnnnnnnnnnnnnnnnnnnnnnnnnnnnnnnnnnnnnnnnnnnnnnnnnnnnnnnnnnnnnnnnnnnnnnnnnnnnnnnnnnnnnnnnnnnnnnnnnnnnnnnnnnnnnnnnnnnnnnnnnnnnnnnnnnnnnnnnnnnnnnnnnnnnnnnnnnnnnnnnnnnnnnnnnnnnnnnnnnnnnnnnnnnnnnnnnnnnnnnnnnnnnnnnnnnnnnnnnnnnnnnnnnnnnnnnnnnnnnnnnnnnnnnnnnnnnnnnnnnnnnnnnnnnnnnnnnnnnnnnnnnnnnnnnnnnnnnnnnnnnnnnnnnnnnnnnnnnnnnnnnnnnnnnnnnnnnnnnnnnnnnnnnnnnnnnnnnnnnnnnnnnnnnnnnnnnnnnnnnnnnnnnnnnnnnnnnnnnnnnnnnnnnnnnnnnnnnnnnnnnnnnnnnnnnnnnnnnnnnnnnnnnnnnnnnnnnnnnnnnnnnnnnnnnnnnnnnnnnnnnnnnnnnnnnnnnnnnnnnnnnnnnnnnnnnnnnnnnnnnnnnnnnnnnnnnnnnnnnnnnnnnnnnnnnnnnnnnnnnnnnnnnnnnnnnnnnnnnnnnnnnnnnnnnnnnnnnnnnnnnnnnnnnnnnnnnnnnnnnnnnnnnnnnnnnnnnnnnnnnnnnnnnnnnnnnnnnnnnnnnnnnnnnnnnnnnnnnnnnnnnnnnnnnnnnnnnnnnnnnnnnnnnnnnnnnnnnnnnnnnnnnnnnnnnnnnnnnnnnnnnnnnnnnnnnnnnnnnnnnnnnnnnnnnnnnnnnnnnnnnnnnnnnnnnnnnnnnnnnnnnnnnnnnnnnnnnnnnnnnnnnnnnnnnnnnnnnnnnnnnnnnnnnnnnnnnnnnnnnnnnnnnnnnnnnnnnnnnnnnnnnnnnnnnnnnnnnnnnnnnnnnnnnnnnnnnnnnnnnnnnnnnnnnnnnnnnnnnnnnnnnnnnnnnnnnnnnnnnnnnnnnnnnnnnnnnnnnnnnnnnnnnnnnnnnnnnnnnnnnnnnnnnnnnnnnnnnnnnnnnnnnnnnnnnnnnnnnnnnnnnnnnnnnnnnnnnnnnnnnnnnnnnnnnnnnnnnnnnnnnnnnnnnnnnnnnnnnnnnnnnnnnnnnnnnnnnnnnnnnnnnnnnnnnnnnnnnnnnnnnnnnnnnnnnnnnnnnnnnnnnnnnnnnnnnnnnnnnnnnnnnnnnnnnnnnnnnnnnnnnnnnnnnnnnnnnnnnnnnnnnnnnnnnnnnnnnnnnnnnnnnnnnnnnnnnnnnnnnnnnnnnnnnnnnnnnnnnnnnnnnnnnnnnnnnnnnnnnnnnnnnnnnnnnnnnnnnnnnnnnnnnnnnnnnnnnnnnnnnnnnnnnnnnnnnnnnnnnnnnnnnnnnnnnnnnnnnnnnnnnnnnnnnnnnnnnnnnnnnnnnnnnnnnnnnnnnnnnnnnnnnnnnnnnnnnnnnnnnnnnnnnnnnnnnnnnnnnnnnnnnnnnnnnnnnnnnnnnnnnnnnnnnnnnnnnnnnnnnnnnnnnnnnnnnnnnnnnnnnnnnnnnnnnnnnnnnnnnnnnnnnnnnnnnnnnnnnnnnnnnnnnnnnnnnnnnnnnnnnnnnnnnnnnnnnnnnnnnnnnnnnnnnnnnnnnnnnnnnnnnnnnnnnnnnnnnnnnnnnnnnnnnnnnnnnnnnnnnnnnnnnnnnnnnnnnnnnnnnnnnnnnnnnnnnnnnnnnnnnnnnnnnnnnnnnnnnnnnnnnnnnnnnnnnnnnnnnnnnnnnnnnnnnnnnnnnnnnnnnnnnnnnnnnnnnnnnnnnnnnnnnnnnnnnnnnnnnnnnnnnnnnnnnnnnnnnnnnnnnnnnnnnnnnnnnnnnnnnnnnnnnnnnnnnnnnnnnnnnnnnnnnnnnnnnnnnnnnnnnnnnnnnnnnnnnnnnnnnnnnnnnnnnnnnnnnnnnnnnnnnnnnnnnnnnnnnnnnnnnnnnnnnnnnnnnnnnnnnnnnnnnnnnnnnnnnnnnnnnnnnnnnnnnnnnnnnnnnnnnnnnnnnnnnnnnnnnnnnnnnnnnnnnnnnnnnnnnnnnnnnnnnnnnnnnnnnnnnnnnnnnnnnnnnnnnnnnnnnnnnnnnnnnnnnnnnnnnnnnnnnnnnnnnnnnnnnnnnnnnnnnnnnnnnnnnnnnnnnnnnnnnnnnnnnnnnnnnnnnnnnnnnnnnnnnnnnnnnnnnnnnnnnnnnnnnnnnnnnnnnnnnnnnnnnnnnnnnnnnnnnnnnnnnnnnnnnnnnnnnnnnnnnnnnnnnnnnnnnnnnnnnnnnnnnnnnnnnnnnnnnnnnnnnnnnnnnnnnnnnnnnnnnnnnnnnnnnnnnnnnnnnnnnnnnnnnnnnnnnnnnnnnnnnnnnnnnnnnnnnnnnnnnnnnnnnnnnnnnnnnnnnnnnnnnnnnnnnnnnnnnnnnnnnnnnnnnnnnnnnnnnnnnnnnnnnnnnnnnnnnnnnnnnnnnnnnnnnnnnnnnnnnnnnnnnnnnnnnnnnnnnnnnnnnnnnnnnnnnnnnnnnnnnnnnnnnnnnnnnnnnnnnnnnnnnnnnnnnnnnnnnnnnnnnnnnnnnnnnnnnnnnnnnnnnnnnnnnnnnnnnnnnnnnnnnnnnnnnnnnnnnnnnnnnnnnnnnnnnnnnnnnnnnnnnnnnnnnnnnnnnnnnnnnnnnnnnnnnnnnnnnnnnnnnnnnnnnnnnnnnnnnnnnnnnnnnnnnnnnnnnnnnnnnnnnnnnnnnnnnnnnnnnnnnnnnnnnnnnnnnnnnnnnnnnnnnnnnnnnnnnnnnnnnnnnnnnnnnnnnnnnnnnnnnnnnnnnnnnnnnnnnnnnnnnnnnnnnnnnnnnnnnnnnnnnnnnnnnnnnnnnnnnnnnnnnnnnnnnnnnnnnnnnnnnnnnnnnnnnnnnnnnnnnnnnnnnnnnnnnnnnnnnnnnnnnnnnnnnnnnnnnnnnnnnnnnnnnnnnnnnnnnnnnnnnnnnnnnnnnnnnnnnnnnnnnnnnnnnnnnnnnnnnnnnnnnnnnnnnnnnnnnnnnnnnnnnnnnnnnnnnnnnnnnnnnnnnnnnnnnnnnnnnnnnnnnnnnnnnnnnnnnnnnnnnnnnnnnnnnnnnnnnnnnnnnnnnnnnnnnnnnnnnnnnnnnnnnnnnnnnnnnnnnnnnnnnnnnnnnnnnnnnnnnnnnnnnnnnnnnnnnnnnnnnnnnnnnnnnnnnnnnnnnnnnnnnnnnnnnnnnnnnnnnnnnnnnnnnnnnnnnnnnnnnnnnnnnnnnnnnnnnnnnnnnnnnnnnnnnnnnnnnnnnnnnnnnnnnnnnnnnnnnnnnnnnnnnnnnnnnnnnnnnnnnnnnnnnnnnnnnnnnnnnnnnnnnnnnnnnnnnnnnnnnnnnnnnnnnnnnnnnnnnnnnnnnnnnnnnnnnnnnnnnnnnnnnnnnnnnnnnnnnnnnnnnnnnnnnnnnnnnnnnnnnnnnnnnnnnnnnnnnnnnnnnnnnnnnnnnnnnnnnnnnnnnnnnnnnnnnnnnnnnnnnnnnnnnnnnnnnnnnnnnnnnnnnnnnnnnnnnnnnnnnnnnnnnnnnnnnnnnnnnnnnnnnnnnnnnnnnnnnnnnnnnnnnnnnnnnnnnnnnnnnnnnnnnnnnnnnnnnnnnnnnnnnnnnnnnnnnnnnnnnnnnnnnnnnnnnnnnnnnnnnnnnnnnnnnnnnnnnnnnnnnnnnnnnnnnnnnnnnnnnnnnnnnnnnnnnnnnnnnnnnnnnnnnnnnnnnnnnnnnnnnnnnnnnnnnnnnnnnnnnnnnnnnnnnnnnnnnnnnnnnnnnnnnnnnnnnnnnnnnnnnnnnnnnnnnnnnnnnnnnnnnnnnnnnnnnnnnnnnnnnnnnnnnnnnnnnnnnnnnnnnnnnnnnnnnnnnnnnnnnnnnnnnnnnnnnnnnnnnnnnnnnnnnnnnnnnnnnnnnnnnnnnnnnnnnnnnnnnnnnnnnnnnnnnnnnnnnnnnnnnnnnnnnnnnnnnnnnnnnnnnnnnnnnnnnnnnnnnnnnnnnnnnnnnnnnnnnnnnnnnnnnnnnnnnnnnnnnnnnnnnnnnnnnnnnnnnnnnnnnnnnnnnnnnnnnnnnnnnnnnnnnnnnnnnnnnnnnnnnnnnnnnnnnnnnnnnnnnnnnnnnnnnnnnnnnnnnnnnnnnnnnnnnnnnnnnnnnnnnnnnnnnnnnnnnnnnnnnnnnnnnnnnnnnnnnnnnnnnnnnnnnnnnnnnnnnnnnnnnnnnnnnnnnnnnnnnnnnnnnnnnnnnnnnnnnnnnnnnnnnnnnnnnnnnnnnnnnnnnnnnnnnnnnnnnnnnnnnnnnnnnnnnnnnnnnnnnnnnnnnnnnnnnnnnnnnnnnnnnnnnnnnnnnnnnnnnnnnnnnnnnnnnnnnnnnnnnnnnnnnnnnnnnnnnnnnnnnnnnnnnnnnnnnnnnnnnnnnnnnnnnnnnnnnnnnnnnnnnnnnnnnnnnnnnnnnnnnnnnnnnnnnnnnnnnnnnnnnnnnnnnnnnnnnnnnnnnnnnnnnnnnnnnnnnnnnnnnnnnnnnnnnnnnnnnnnnnnnnnnnnnnnnnnnnnnnnnnnnnnnnnnnnnnnnnnnnnnnnnnnnnnnnnnnnnnnnnnnnnnnnnnnnnnnnnnnnnnnnnnnnnnnnnnnnnnnnnnnnnnnnnnnnnnnnnnnnnnnnnnnnnnnnnnnnnnnnnnnnnnnnnnnnnnnnnnnnnnnnnnnnnnnnnnnnnnnnnnnnnnnnnnnnnnnnnnnnnnnnnnnnnnnnnnnnnnnnnnnnnnnnnnnnnnnnnnnnnnnnnnnnnnnnnnnnnnnnnnnnnnnnnnnnnnnnnnnnnnnnnnnnnnnnnnnnnnnnnnnnnnnnnnnnnnnnnnnnnnnnnnnnnnnnnnnnnnnnnnnnnnnnnnnnnnnnnnnnnnnnnnnnnnnnnnnnnnnnnnnnnnnnnnnnnnnnnnnnnnnnnnnnnnnnnnnnnnnnnnnnnnnnnnnnnnnnnnnnnnnnnnnnnnnnnnnnnnnnnnnnnnnnnnnnnnnnnnnnnnnnnnnnnnnnnnnnnnnnnnnnnnnnnnnnnnnnnnnnnnnnnnnnnnnnnnnnnnnnnnnnnnnnnnnnnnnnnnnnnnnnnnnnnnnnnnnnnnnnnnnnnnnnnnnnnnnnnnnnnnnnnnnnnnnnnnnnnnnnnnnnnnnnnnnnnnnnnnnnnnnnnnnnnnnnnnnnnnnnnnnnnnnnnnnnnnnnnnnnnnnnnnnnnnnnnnnnnnnnnnnnnnnnnnnnnnnnnnnnnnnnnnnnnnnnnnnnnnnnnnnnnnnnnnnnnnnnnnnnnnnnnnnnnnnnnnnnnnnnnnnnnnnnnnnnnnnnnnnnnnnnnnnnnnnnnnnnnnnnnnnnnnnnnnnnnnnnnnnnnnnnnnnnnnnnnnnnnnnnnnnnnnnnnnnnnnnnnnnnnnnnnnnnnnnnnnnnnnnnnnnnnnnnnnnnnnnnnnnnnnnnnnnnnnnnnnnnnnnnnnnnnnnnnnnnnnnnnnnnnnnnnnnnnnnnnnnnnnnnnnnnnnnnnnnnnnnnnnnnnnnnnnnnnnnnnnnnnnnnnnnnnnnnnnnnnnnnnnnnnnnnnnnnnnnnnnnnnnnnnnnnnnnnnnnnnnnnnnnnnnnnnnnnnnnnnnnnnnnnnnnnnnnnnnnnnnnnnnnnnnnnnnnnnnnnnnnnnnnnnnnnnnnnnnnnnnnnnnnnnnnnnnnnnnnnnnnnnnnnnnnnnnnnnnnnnnnnnnnnnnnnnnnnnnnnnnnnnnnnnnnnnnnnnnnnnnnnnnnnnnnnnnnnnnnnnnnnnnnnnnnnnnnnnnnnnnnnnnnnnnnnnnnnnnnnnnnnnnnnnnnnnnnnnnnnnnnnnnnnnnnnnnnnnnnnnnnnnnnnnnnnnnnnnnnnnnnnnnnnnnnnnnnnnnnnnnnnnnnnnnnnnnnnnnnnnnnnnnnnnnnnnnnnnnnnnnnnnnnnnnnnnnnnnnnnnnnnnnnnnnnnnnnnnnnnnnnnnnnnnnnnnnnnnnnnnnnnnnnnnnnnnnnnnnnnnnnnnnnnnnnnnnnnnnnnnnnnnnnnnnnnnnnnnnnnnnnnnnnnnnnnnnnnnnnnnnnnnnnnnnnnnnnnnnnnnnnnnnnnnnnnnnnnnnnnnnnnnnnnnnnnnnnnnnnnnnnnnnnnnnnnnnnnnnnnnnnnnnnnnnnnnnnnnnnnnnnnnnnnnnnnnnnnnnnnnnnnnnnnnnnnnnnnnnnnnnnnnnnnnnnnnnnnnnnnnnnnnnnnnnnnnnnnnnnnnnnnnnnnnnnnnnnnnnnnnnnnnnnnnnnnnnnnnnnnnnnnnnnnnnnnnnnnnnnnnnnnnnnnnnnnnnnnnnnnnnnnnnnnnnnnnnnnnnnnnnnnnnnnnnnnnnnnnnnnnnnnnnnnnnnnnnnnnnnnnnnnnnnnnnnnnnnnnnnnnnnnnnnnnnnnnnnnnnnnnnnnnnnnnnnnnnnnnnnnnnnnnnnnnnnnnnnnnnnnnnnnnnnnnnnnnnnnnnnnnnnnnnnnnnnnnnnnnnnnnnnnnnnnnnnnnnnnnnnnnnnnnnnnnnnnnnnnnnnnnnnnnnnnnnnnnnnnnnnnnnnnnnnnnnnnnnnnnnnnnnnnnnnnnnnnnnnnnnnnnnnnnnnnnnnnnnnnnnnnnnnnnnnnnnnnnnnnnnnnnnnnnnnnnnnnnnnnnnnnnnnnnnnnnnnnnnnnnnnnnnnnnnnnnnnnnnnnnnnnnnnnnnnnnnnnnnnnnnnnnnnnnnnnnnnnnnnnnnnnnnnnnnnnnnnnnnnnnnnnnnnnnnnnnnnnnnnnnnnnnnnnnnnnnnnnnnnnnnnnnnnnnnnnnnnnnnnnnnnnnnnnnnnnnnnnnnnnnnnnnnnnnnnnnnnnnnnnnnnnnnnnnnnnnnnnnnnnnnnnnnnnnnnnnnnnnnnnnnnnnnnnnnnnnnnnnnnnnnnnnnnnnnnnnnnnnnnnnnnnnnnnnnnnnnnnnnnnnnnnnnnnnnnnnnnnnnnnnnnnnnnnnnnnnnnnnnnnnnnnnnnnnnnnnnnnnnnnnnnnnnnnnnnnnnnnnnnnnnnnnnnnnnnnnnnnnnnnnnnnnnnnnnnnnnnnnnnnnnnnnnnnnnnnnnnnnnnnnnnnnnnnnnnnnnnnnnnnnnnnnnnnnnnnnnnnnnnnnnnnnnnnnnnnnnnnnnnnnnnnnnnnnnnnnnnnnnnnnnnnnnnnnnnnnnnnnnnnnnnnnnnnnnnnnnnnnnnnnnnnnnnnnnnnnnnnnnnnnnnnnnnnnnnnnnnnnnnnnnnnnnnnnnnnnnnnnnnnnnnnnnnnnnnnnnnnnnnnnnnnnnnnnnnnnnnnnnnnnnnnnnnnnnnnnnnnnnnnnnnnnnnnnnnnnnnnnnnnnnnnnnnnnnnnnnnnnnnnnnnnnnnnnnnnnnnnnnnnnnnnnnnnnnnnnnnnnnnnnnnnnnnnnnnnnnnnnnnnnnnnnnnnnnnnnnnnnnnnnnnnnnnnnnnnnnnnnnnnnnnnnnnnnnnnnnnnnnnnnnnnnnnnnnnnnnnnnnnnnnnnnnnnnnnnnnnnnnnnnnnnnnnnnnnnnnnnnnnnnnnnnnnnnnnnnnnnnnnnnnnnnnnnnnnnnnnnnnnnnnnnnnnnnnnnnnnnnnnnnnnnnnnnnnnnnnnnnnnnnnnnnnnnnnnnnnnnnnnnnnnnnnnnnnnnnnnnnnnnnnnnnnnnnnnnnnnnnnnnnnnnnnnnnnnnnnnnnnnnnnnnnnnnnnnnnnnnnnnnnnnnnnnnnnnnnnnnnnnnnnnnnnnnnnnnnnnnnnnnnnnnnnnnnnnnnnnnnnnnnnnnnnnnnnnnnnnnnnnnnnnnnnnnnnnnnnnnnnnnnnnnnnnnnnnnnnnnnnnnnnnnnnnnnnnnnnnnnnnnnnnnnnnnnnnnnnnnnnnnnnnnnnnnnnnnnnnnnnnnnnnnnnnnnnnnnnnnnnnnnnnnnnnnnnnnnnnnnnnnnnnnnnnnnnnnnnnnnnnnnnnnnnnnnnnnnnnnnnnnnnnnnnnnnnnnnnnnnnnnnnnnnnnnnnnnnnnnnnnnnnnnnnnnnnnnnnnnnnnnnnnnnnnnnnnnnnnnnnnnnnnnnnnnnnnnnnnnnnnnnnnnnnnnnnnnnnnnnnnnnnnnnnnnnnnnnnnnnnnnnnnnnnnnnnnnnnnnnnnnnnnnnnnnnnnnnnnnnnnnnnnnnnnnnnnnnnnnnnnnnnnnnnnnnnnnnnnnnnnnnnnnnnnnnnnnnnnnnnnnnnnnnnnnnnnnnnnnnnnnnnnnnnnnnnnnnnnnnnnnnnnnnnnnnnnnnnnnnnnnnnnnnnnnnnnnnnnnnnnnnnnnnnnnnnnnnnnnnnnnnnnnnnnnnnnnnnnnnnnnnnnnnnnnnnnnnnnnnnnnnnnnnnnnnnnnnnnnnnnnnnnnnnnnnnnnnnnnnnnnnnnnnnnnnnnnnnnnnnnnnnnnnnnnnnnnnnnnnnnnnnnnnnnnnnnnnnnnnnnnnnnnnnnnnnnnnnnnnnnnnnnnnnnnnnnnnnnnnnnnnnnnnnnnnnnnnnnnnnnnnnnnnnnnnnnnnnnnnnnnnnnnnnnnnnnnnnnnnnnnnnnnnnnnnnnnnnnnnnnnnnnnnnnnnnnnnnnnnnnnnnnnnnnnnnnnnnnnnnnnnnnnnnnnnnnnnnnnnnnnnnnnnnnnnnnnnnnnnnnnnnnnnnnnnnnnnnnnnnnnnnnnnnnnnnnnnnnnnnnnnnnnnnnnnnnnnnnnnnnnnnnnnnnnnnnnnnnnnnnnnnnnnnnnnnnnnnnnnnnnnnnnnnnnnnnnnnnnnnnnnnnnnnnnnnnnnnnnnnnnnnnnnnnnnnnnnnnnnnnnnnnnnnnnnnnnnnnnnnnnnnnnnnnnnnnnnnnnnnnnnnnnnnnnnnnnnnnnnnnnnnnnnnnnnnnnnnnnnnnnnnnnnnnnnnnnnnnnnnnnnnnnnnnnnnnnnnnnnnnnnnnnnnnnnnnnnnnnnnnnnnnnnnnnnnnnnnnnnnnnnnnnnnnnnnnnnnnnnnnnnnnnnnnnnnnnnnnnnnnnnnnnnnnnnnnnnnnnnnnnnnnnnnnnnnnnnnnnnnnnnnnnnnnnnnnnnnnnnnnnnnnnnnnnnnnnnnnnnnnnnnnnnnnnnnnnnnnnnnnnnnnnnnnnnnnnnnnnnnnnnnnnnnnnnnnnnnnnnnnnnnnnnnnnnnnnnnnnnnnnnnnnnnnnnnnnnnnnnnnnnnnnnnnnnnnnnnnnnnnnnnnnnnnnnnnnnnnnnnnnnnnnnnnnnnnnnnnnnnnnnnnnnnnnnnnnnnnnnnnnnnnnnnnnnnnnnnnnnnnnnnnnnnnnnnnnnnnnnnnnnnnnnnnnnnnnnnnnnnnnnnnnnnnnnnnnnnnnnnnnnnnnnnnnnnnnnnnnnnnnnnnnnnnnnnnnnnnnnnnnnnnnnnnnnnnnnnnnnnnnnnnnnnnnnnnnnnnnnnnnnnnnnnnnnnnnnnnnnnnnnnnnnnnnnnnnnnnnnnnnnnnnnnnnnnnnnnnnnnnnnnnnnnnnnnnnnnnnnnnnnnnnnnnnnnnnnnnnnnnnnnnnnnnnnnnnnnnnnnnnnnnnnnnnnnnnnnnnnnnnnnnnnnnnnnnnnnnnnnnnnnnnnnnnnnnnnnnnnnnnnnnnnnnnnnnnnnnnnnnnnnnnnnnnnnnnnnnnnnnnnnnnnnnnnnnnnnnnnnnnnnnnnnnnnnnnnnnnnnnnnnnnnnnnnnnnnnnnnnnnnnnnnnnnnnnnnnnnnnnnnnnnnnnnnnnnnnnnnnnnnnnnnnnnnnnnnnnnnnnnnnnnnnnnnnnnnnnnnnnnnnnnnnnnnnnnnnnnnnnnnnnnnnnnnnnnnnnnnnnnnnnnnnnnnnnnnnnnnnnnnnnnnnnnnnnnnnnnnnnnnnnnnnnnnnnnnnnnnnnnnnnnnnnnnnnnnnnnnnnnnnnnnnnnnnnnnnnnnnnnnnnnnnnnnnnnnnnnnnnnnnnnnnnnnnnnnnnnnnnnnnnnnnnnnnnnnnnnnnnnnnnnnnnnnnnnnnnnnnnnnnnnnnnnnnnnnnnnnnnnnnnnnnnnnnnnnnnnnnnnnnnnnnnnnnnnnnnnnnnnnnnnnnnnnnnnnnnnnnnnnnnnnnnnnnnnnnnnnnnnnnnnnnnnnnnnnnnnnnnnnnnnnnnnnnnnnnnnnnnnnnnnnnnnnnnnnnnnnnnnnnnnnnnnnnnnnnnnnnnnnnnnnnnnnnnnnnnnnnnnnnnnnnnnnnnnnnnnnnnnnnnnnnnnnnnnnnnnnnnnnnnnnnnnnnnnnnnnnnnnnnnnnnnnnnnnnnnnnnnnnnnnnnnnnnnnnnnnnnnnnnnnnnnnnnnnnnnnnnnnnnnnnnnnnnnnnnnnnnnnnnnnnnnnnnnnnnnnnnnnnnnnnnnnnnnnnnnnnnnnnnnnnnnnnnnnnnnnnnnnnnnnnnnnnnnnnnnnnnnnnnnnnnnnnnnnnnnnnnnnnnnnnnnnnnnnnnnnnnnnnnnnnnnnnnnnnnnnnnnnnnnnnnnnnnnnnnnnnnnnnnnnnnnnnnnnnnnnnnnnnnnnnnnnnnnnnnnnnnnnnnnnnnnnnnnnnnnnnnnnnnnnnnnnnnnnnnnnnnnnnnnnnnnnnnnnnnnnnnnnnnnnnnnnnnnnnnnnnnnnnnnnnnnnnnnnnnnnnnnnnnnnnnnnnnnnnnnnnnnnnnnnnnnnnnnnnnnnnnnnnnnnnnnnnnnnnnnnnnnnnnnnnnnnnnnnnnnnnnnnnnnnnnnnnnnnnnnnnnnnnnnnnnnnnnnnnnnnnnnnnnnnnnnnnnnnnnnnnnnnnnnnnnnnnnnnnnnnnnnnnnnnnnnnnnnnnnnnnnnnnnnnnnnnnnnnnnnnnnnnnnnnnnnnnnnnnnnnnnnnnnnnnnnnnnnnnnnnnnnnnnnnnnnnnnnnnnnnnnnnnnnnnnnnnnnnnnnnnnnnnnnnnnnnnnnnnnnnnnnnnnnnnnnnnnnnnnnnnnnnnnnnnnnnnnnnnnnnnnnnnnnnnnnnnnnnnnnnnnnnnnnnnnnnnnnnnnnnnnnnnnnnnnnnnnnnnnnnnnnnnnnnnnnnnnnnnnnnnnnnnnnnnnnnnnnnnnnnnnnnnnnnnnnnnnnnnnnnnnnnnnnnnnnnnnnnnnnnnnnnnnnnnnnnnnnnnnnnnnnnnnnnnnnnnnnnnnnnnnnnnnnnnnnnnnnnnnnnnnnnnnnnnnnnnnnnnnnnnnnnnnnnnnnnnnnnnnnnnnnnnnnnnnnnnnnnnnnnnnnnnnnnnnnnnnnnnnnnnnnnnnnnnnnnnnnnnnnnnnnnnnnnnnnnnnnnnnnnnnnnnnnnnnnnnnnnnnnnnnnnnnnnnnnnnnnnnnnnnnnnnnnnnnnnnnnnnnnnnnnnnnnnnnnnnnnnnnnnnnnnnnnnnnnnnnnnnnnnnnnnnnnnnnnnnnnnnnnnnnnnnnnnnnnnnnnnnnnnnnnnnnnnnnnnnnnnnnnnnnnnnnnnnnnnnnnnnnnnnnnnnnnnnnnnnnnnnnnnnnnnnnnnnnnnnnnnnnnnnnnnnnnnnnnnnnnnnnnnnnnnnnnnnnnnnnnnnnnnnnnnnnnnnnnnnnnnnnnnnnnnnnnnnnnnnnnnnnnnnnnnnnnnnnnnnnnnnnnnnnnnnnnnnnnnnnnnnnnnnnnnnnnnnnnnnnnnnnnnnnnnnnnnnnnnnnnnnnnnnnnnnnnnnnnnnnnnnnnnnnnnnnnnnnnnnnnnnnnnnnnnnnnnnnnnnnnnnnnnnnnnnnnnnnnnnnnnnnnnnnnnnnnnnnnnnnnnnnnnnnnnnnnnnnnnnnnnnnnnnnnnnnnnnnnnnnnnnnnnnnnnnnnnnnnnnnnnnnnnnnnnnnnnnnnnnnnnnnnnnnnnnnnnnnnnnnnnnnnnnnnnnnnnnnnnnnnnnnnnnnnnnnnnnnnnnnnnnnnnnnnnnnnnnnnnnnnnnnnnnnnnnnnnnnnnnnnnnnnnnnnnnnnnnnnnnnnnnnnnnnnnnnnnnnnnnnnnnnnnnnnnnnnnnnnnnnnnnnnnnnnnnnnnnnnnnnnnnnnnnnnnnnnnnnnnnnnnnnnnnnnnnnnnnnnnnnnnnnnnnnnnnnnnnnnnnnnnnnnnnnnnnnnnnnnnnnnnnnnnnnnnnnnnnnnnnnnnnnnnnnnnnnnnnnnnnnnnnnnnnnnnnnnnnnnnnnnnnnnnnnnnnnnnnnnnnnnnnnnnnnnnnnnnnnnnnnnnnnnnnnnnnnnnnnnnnnnnnnnnnnnnnnnnnnnnnnnnnnnnnnnnnnnnnnnnnnnnnnnnnnnnnnnnnnnnnnnnnnnnnnnnnnnnnnnnnnnnnnnnnnnnnnnnnnnnnnnnnnnnnnnnnnnnnnnnnnnnnnnnnnnnnnnnnnnnnnnnnnnnnnnnnnnnnnnnnnnnnnnnnnnnnnnnnnnnnnnnnnnnnnnnnnnnnnnnnnnnnnnnnnnnnnnnnnnnnnnnnnnnnnnnnnnnnnnnnnnnnnnnnnnnnnnnnnnnnnnnnnnnnnnnnnnnnnnnnnnnnnnnnnnnnnnnnnnnnnnnnnnnnnnnnnnnnnnnnnnnnnnnnnnnnnnnnnnnnnnnnnnnnnnnnnnnnnnnnnnnnnnnnnnnnnnnnnnnnnnnnnnnnnnnnnnnnnnnnnnnnnnnnnnnnnnnnnnnnnnnnnnnnnnnnnnnnnnnnnnnnnnnnnnnnnnnnnnnnnnnnnnnnnnnnnnnnnnnnnnnnnnnnnnnnnnnnnnnnnnnnnnnnnnnnnnnnnnnnnnnnnnnnnnnnnnnnnnnnnnnnnnnnnnnnnnnnnnnnnnnnnnnnnnnnnnnnnnnnnnnnnnnnnnnnnnnnnnnnnnnnnnnnnnnnnnnnnnnnnnnnnnnnnnnnnnnnnnnnnnnnnnnnnnnnnnnnnnnnnnnnnnnnnnnnnnnnnnnnnnnnnnnnnnnnnnnnnnnnnnnnnnnnnnnnnnnnnnnnnnnnnnnnnnnnnnnnnnnnnnnnnnnnnnnnnnnnnnnnnnnnnnnnnnnnnnnnnnnnnnnnnnnnnnnnnnnnnnnnnnnnnnnnnnnnnnnnnnnnnnnnnnnnnnnnnnnnnnnnnnnnnnnnnnnnnnnnnnnnnnnnnnnnnnnnnnnnnnnnnnnnnnnnnnnnnnnnnnnnnnnnnnnnnnnnnnnnnnnnnnnnnnnnnnnnnnnnnnnnnnnnnnnnnnnnnnnnnnnnnnnnnnnnnnnnnnnnnnnnnnnnnnnnnnnnnnnnnnnnnnnnnnnnnnnnnnnnnnnnnnnnnnnnnnnnnnnnnnnnnnnnnnnnnnnnnnnnnnnnnnnnnnnnnnnnnnnnnnnnnnnnnnnnnnnnnnnnnnnnnnnnnnnnnnnnnnnnnnnnnnnnnnnnnnnnnnnnnnnnnnnnnnnnnnnnnnnnnnnnnnnnnnnnnnnnnnnnnnnnnnnnnnnnnnnnnnnnnnnnnnnnnnnnnnnnnnnnnnnnnnnnnnnnnnnnnnnnnnnnnnnnnnnnnnnnnnnnnnnnnnnnnnnnnnnnnnnnnnnnnnnnnnnnnnnnnnnnnnnnnnnnnnnnnnnnnnnnnnnnnnnnnnnnnnnnnnnnnnnnnnnnnnnnnnnnnnnnnnnnnnnnnnnnnnnnnnnnnnnnnnnnnnnnnnnnnnnnnnnnnnnnnnnnnnnnnnnnnnnnnnnnnnnnnnnnnnnnnnnnnnnnnnnnnnnnnnnnnnnnnnnnnnnnnnnnnnnnnnnnnnnnnnnnnnnnnnnnnnnnnnnnnnnnnnnnnnnnnnnnnnnnnnnnnnnnnnnnnnnnnnnnnnnnnnnnnnnnnnnnnnnnnnnnnnnnnnnnnnnnnnnnnnnnnnnnnnnnnnnnnnnnnnnnnnnnnnnnnnnnnnnnnnnnnnnnnnnnnnnnnnnnnnnnnnnnnnnnnnnnnnnnnnnnnnnnnnnnnnnnnnnnnnnnnnnnnnnnnnnnnnnnnnnnnnnnnnnnnnnnnnnnnnnnnnnnnnnnnnnnnnnnnnnnnnnnnnnnnnnnnnnnnnnnnnnnnnnnnnnnnnnnnnnnnnnnnnnnnnnnnnnnnnnnnnnnnnnnnnnnnnnnnnnnnnnnnnnnnnnnnnnnnnnnnnnnnnnnnnnnnnnnnnnnnnnnnnnnnnnnnnnnnnnnnnnnnnnnnnnnnnnnnnnnnnnnnnnnnnnnnnnnnnnnnnnnnnnnnnnnnnnnnnnnnnnnnnnnnnnnnnnnnnnnnnnnnnnnnnnnnnnnnnnnnnnnnnnnnnnnnnnnnnnnnnnnnnnnnnnnnnnnnnnnnnnnnnnnnnnnnnnnnnnnnnnnnnnnnnnnnnnnnnnnnnnnnnnnnnnnnnnnnnnnnnnnnnnnnnnnnnnnnnnnnnnnnnnnnnnnnnnnnnnnnnnnnnnnnnnnnnnnnnnnnnnnnnnnnnnnnnnnnnnnnnnnnnnnnnnnnnnnnnnnnnnnnnnnnnnnnnnnnnnnnnnnnnnnnnnnnnnnnnnnnnnnnnnnnnnnnnnnnnnnnnnnnnnnnnnnnnnnnnnnnnnnnnnnnnnnnnnnnnnnnnnnnnnnnnnnnnnnnnnnnnnnnnnnnnnnnnnnnnnnnnnnnnnnnnnnnnnnnnnnnnnnnnnnnnnnnnnnnnnnnnnnnnnnnnnnnnnnnnnnnnnnnnnnnnnnnnnnnnnnnnnnnnnnnnnnnnnnnnnnnnnnnnnnnnnnnnnnnnnnnnnnnnnnnnnnnnnnnnnnnnnnnnnnnnnnnnnnnnnnnnnnnnnnnnnnnnnnnnnnnnnnnnnnnnnnnnnnnnnnnnnnnnnnnnnnnnnnnnnnnnnnnnnnnnnnnnnnnnnnnnnnnnnnnnnnnnnnnnnnnnnnnnnnnnnnnnnnnnnnnnnnnnnnnnnnnnnnnnnnnnnnnnnnnnnnnnnnnnnnnnnnnnnnnnnnnnnnnnnnnnnnnnnnnnnnnnnnnnnnnnnnnnnnnnnnnnnnnnnnnnnnnnnnnnnnnnnnnnnnnnnnnnnnnnnnnnnnnnnnnnnnnnnnnnnnnnnnnnnnnnnnnnnnnnnnnnnnnnnnnnnnnnnnnnnnnnnnnnnnnnnnnnnnnnnnnnnnnnnnnnnnnnnnnnnnnnnnnnnnnnnnnnnnnnnnnnnnnnnnnnnnnnnnnnnnnnnnnnnnnnnnnnnnnnnnnnnnnnnnnnnnnnnnnnnnnnnnnnnnnnnnnnnnnnnnnnnnnnnnnnnnnnnnnnnnnnnnnnnnnnnnnnnnnnnnnnnnnnnnnnnnnnnnnnnnnnnnnnnnnnnnnnnnnnnnnnnnnnnnnnnnnnnnnnnnnnnnnnnnnnnnnnnnnnnnnnnnnnnnnnnnnnnnnnnnnnnnnnnnnnnnnnnnnnnnnnnnnnnnnnnnnnnnnnnnnnnnnnnnnnnnnnnnnnnnnnnnnnnnnnnnnnnnnnnnnnnnnnnnnnnnnnnnnnnnnnnnnnnnnnnnnnnnnnnnnnnnnnnnnnnnnnnnnnnnnnnnnnnnnnnnnnnnnnnnnnnnnnnnnnnnnnnnnnnnnnnnnnnnnnnnnnnnnnnnnnnnnnnnnnnnnnnnnnnnnnnnnnnnnnnnnnnnnnnnnnnnnnnnnnnnnnnnnnnnnnnnnnnnnnnnnnnnnnnnnnnnnnnnnnnnnnnnnnnnnnnnnnnnnnnnnnnnnnnnnnnnnnnnnnnnnnnnnnnnnnnnnnnnnnnnnnnnnnnnnnnnnnnnnnnnnnnnnnnnnnnnnnnnnnnnnnnnnnnnnnnnnnnnnnnnnnnnnnnnnnnnnnnnnnnnnnnnnnnnnnnnnnnnnnnnnnnnnnnnnnnnnnnnnnnnnnnnnnnnnnnnnnnnnnnnnnnnnnnnnnnnnnnnnnnnnnnnnnnnnnnnnnnnnnnnnnnnnnnnnnnnnnnnnnnnnnnnnnnnnnnnnnnnnnnnnnnnnnnnnnnnnnnnnnnnnnnnnnnnnnnnnnnnnnnnnnnnnnnnnnnnnnnnnnnnnnnnnnnnnnnnnnnnnnnnnnnnnnnnnnnnnnnnnnnnnnnnnnnnnnnnnnnnnnnnnnnnnnnnnnnnnnnnnnnnnnnnnnnnnnnnnnnnnnnnnnnnnnnnnnnnnnnnnnnnnnnnnnnnnnnnnnnnnnnnnnnnnnnnnnnnnnnnnnnnnnnnnnnnnnnnnnnnnnnnnnnnnnnnnnnnnnnnnnnnnnnnnnnnnnnnnnnnnnnnnnnnnnnnnnnnnnnnnnnnnnnnnnnnnnnnnnnnnnnnnnnnnnnnnnnnnnnnnnnnnnnnnnnnnnnnnnnnnnnnnnnnnnnnnnnnnnnnnnnnnnnnnnnnnnnnnnnnnnnnnnnnnnnnnnnnnnnnnnnnnnnnnnnnnnnnnnnnnnnnnnnnnnnnnnnnnnnnnnnnnnnnnnnnnnnnnnnnnnnnnnnnnnnnnnnnnnnnnnnnnnnnnnnnnnnnnnnnnnnnnnnnnnnnnnnnnnnnnnnnnnnnnnnnnnnnnnnnnnnnnnnnnnnnnnnnnnnnnnnnnnnnnnnnnnnnnnnnnnnnnnnnnnnnnnnnnnnnnnnnnnnnnnnnnnnnnnnnnnnnnnnnnnnnnnnnnnnnnnnnnnnnnnnnnnnnnnnnnnnnnnnnnnnnnnnnnnnnnnnnnnnnnnnnnnnnnnnnnnnnnnnnnnnnnnnnnnnnnnnnnnnnnnnnnnnnnnnnnnnnnnnnnnnnnnnnnnnnnnnnnnnnnnnnnnnnnnnnnnnnnnnnnnnnnnnnnnnnnnnnnnnnnnnnnnnnnnnnnnnnnnnnnnnnnnnnnnnnnnnnnnnnnnnnnnnnnnnnnnnnnnnnnnnnnnnnnnnnnnnnnnnnnnnnnnnnnnnnnnnnnnnnnnnnnnnnnnnnnnnnnnnnnnnnnnnnnnnnnnnnnnnnnnnnnnnnnnnnnnnnnnnnnnnnnnnnnnnnnnnnnnnnnnnnnnnnnnnnnnnnnnnnnnnnnnnnnnnnnnnnnnnnnnnnnnnnnnnnnnnnnnnnnnnnnnnnnnnnnnnnnnnnnnnnnnnnnnnnnnnnnnnnnnnnnnnnnnnnnnnnnnnnnnnnnnnnnnnnnnnnnnnnnnnnnnnnnnnnnnnnnnnnnnnnnnnnnnnnnnnnnnnnnnnnnnnnnnnnnnnnnnnnnnnnnnnnnnnnnnnnnnnnnnnnnnnnnnnnnnnnnnnnnnnnnnnnnnnnnnnnnnnnnnnnnnnnnnnnnnnnnnnnnnnnnnnnnnnnnnnnnnnnnnnnnnnnnnnnnnnnnnnnnnnnnnnnnnnnnnnnnnnnnnnnnnnnnnnnnnnnnnnnnnnnnnnnnnnnnnnnnnnnnnnnnnnnnnnnnnnnnnnnnnnnnnnnnnnnnnnnnnnnnnnnnnnnnnnnnnnnnnnnnnnnnnnnnnnnnnnnnnnnnnnnnnnnnnnnnnnnnnnnnnnnnnnnnnnnnnnnnnnnnnnnnnnnnnnnnnnnnnnnnnnnnnnnnnnnnnnnnnnnnnnnnnnnnnnnnnnnnnnnnnnnnnnnnnnnnnnnnnnnnnnnnnnnnnnnnnnnnnnnnnnnnnnnnnnnnnnnnnnnnnnnnnnnnnnnnnnnnnnnnnnnnnnnnnnnnnnnnnnnnnnnnnnnnnnnnnnnnnnnnnnnnnnnnnnnnnnnnnnnnnnnnnnnnnnnnnnnnnnnnnnnnnnnnnnnnnnnnnnnnnnnnnnnnnnnnnnnnnnnnnnnnnnnnnnnnnnnnnnnnnnnnnnnnnnnnnnnnnnnnnnnnnnnnnnnnnnnnnnnnnnnnnnnnnnnnnnnnnnnnnnnnnnnnnnnnnnnnnnnnnnnnnnnnnnnnnnnnnnnnnnnnnnnnnnnnnnnnnnnnnnnnnnnnnnnnnnnnnnnnnnnnnnnnnnnnnnnnnnnnnnnnnnnnnnnnnnnnnnnnnnnnnnnnnnnnnnnnnnnnnnnnnnnnnnnnnnnnnnnnnnnnnnnnnnnnnnnnnnnnnnnnnnnnnnnnnnnnnnnnnnnnnnnnnnnnnnnnnnnnnnnnnnnnnnnnnnnnnnnnnnnnnnnnnnnnnnnnnnnnnnnnnnnnnnnnnnnnnnnnnnnnnnnnnnnnnnnnnnnnnnnnnnnnnnnnnnnnnnnnnnnnnnnnnnnnnnnnnnnnnnnnnnnnnnnnnnnnnnnnnnnnnnnnnnnnnnnnnnnnnnnnnnnnnnnnnnnnnnnnnnnnnnnnnnnnnnnnnnnnnnnnnnnnnnnnnnnnnnnnnnnnnnnnnnnnnnnnnnnnnnnnnnnnnnnnnnnnnnnnnnnnnnnnnnnnnnnnnnnnnnnnnnnnnnnnnnnnnnnnnnnnnnnnnnnnnnnnnnnnnnnnnnnnnnnnnnnnnnnnnnnnnnnnnnnnnnnnnnnnnnnnnnnnnnnnnnnnnnnnnnnnnnnnnnnnnnnnnnnnnnnnnnnnnnnnnnnnnnnnnnnnnnnnnnnnnnnnnnnnnnnnnnnnnnnnnnnnnnnnnnnnnnnnnnnnnnnnnnnnnnnnnnnnnnnnnnnnnnnnnnnnnnnnnnnnnnnnnnnnnnnnnnnnnnnnnnnnnnnnnnnnnnnnnnnnnnnnnnnnnnnnnnnnnnnnnnnnnnnnnnnnnnnnnnnnnnnnnnnnnnnnnnnnnnnnnnnnnnnnnnnnnnnnnnnnnnnnnnnnnnnnnnnnnnnnnnnnnnnnnnnnnnnnnnnnnnnnnnnnnnnnnnnnnnnnnnnnnnnnnnnnnnnnnnnnnnnnnnnnnnnnnnnnnnnnnnnnnnnnnnnnnnnnnnnnnnnnnnnnnnnnnnnnnnnnnnnnnnnnnnnnnnnnnnnnnnnnnnnnnnnnnnnnnnnnnnnnnnnnnnnnnnnnnnnnnnnnnnnnnnnnnnnnnnnnnnnnnnnnnnnnnnnnnnnnnnnnnnnnnnnnnnnnnnnnnnnnnnnnnnnnnnnnnnnnnnnnnnnnnnnnnnnnnnnnnnnnnnnnnnnnnnnnnnnnnnnnnnnnnnnnnnnnnnnnnnnnnnnnnnnnnnnnnnnnnnnnnnnnnnnnnnnnnnnnnnnnnnnnnnnnnnnnnnnnnnnnnnnnnnnnnnnnnnnnnnnnnnnnnnnnnnnnnnnnnnnnnnnnnnnnnnnnnnnnnnnnnnnnnnnnnnnnnnnnnnnnnnnnnnnnnnnnnnnnnnnnnnnnnnnnnnnnnnnnnnnnnnnnnnnnnnnnnnnnnnnnnnnnnnnnnnnnnnnnnnnnnnnnnnnnnnnnnnnnnnnnnnnnnnnnnnnnnnnnnnnnnnnnnnnnnnnnnnnnnnnnnnnnnnnnnnnnnnnnnnnnnnnnnnnnnnnnnnnnnnnnnnnnnnnnnnnnnnnnnnnnnnnnnnnnnnnnnnnnnnnnnnnnnnnnnnnnnnnnnnnnnnnnnnnnnnnnnnnnnnnnnnnnnnnnnnnnnnnnnnnnnnnnnnnnnnnnnnnnnnnnnnnnnnnnnnnnnnnnnnnnnnnnnnnnnnnnnnnnnnnnnnnnnnnnnnnnnnnnnnnnnnnnnnnnnnnnnnnnnnnnnnnnnnnnnnnnnnnnnnnnnnnnnnnnnnnnnnnnnnnnnnnnnnnnnnnnnnnnnnnnnnnnnnnnnnnnnnnnnnnnnnnnnnnnnnnnnnnnnnnnnnnnnnnnnnnnnnnnnnnnnnnnnnnnnnnnnnnnnnnnnnnnnnnnnnnnnnnnnnnnnnnnnnnnnnnnnnnnnnnnnnnnnnnnnnnnnnnnnnnnnnnnnnnnnnnnnnnnnnnnnnnnnnnnnnnnnnnnnnnnnnnnnnnnnnnnnnnnnnnnnnnnnnnnnnnnnnnnnnnnnnnnnnnnnnnnnnnnnnnnnnnnnnnnnnnnnnnnnnnnnnnnnnnnnnnnnnnnnnnnnnnnnnnnnnnnnnnnnnnnnnnnnnnnnnnnnnnnnnnnnnnnnnnnnnnnnnnnnnnnnnnnnnnnnnnnnnnnnnnnnnnnnnnnnnnnnnnnnnnnnnnnnnnnnnnnnnnnnnnnnnnnnnnnnnnnnnnnnnnnnnnnnnnnnnnnnnnnnnnnnnnnnnnnnnnnnnnnnnnnnnnnnnnnnnnnnnnnnnnnnnnnnnnnnnnnnnnnnnnnnnnnnnnnnnnnnnnnnnnnnnnnnnnnnnnnnnnnnnnnnnnnnnnnnnnnnnnnnnnnnnnnnnnnnnnnnnnnnnnnnnnnnnnnnnnnnnnnnnnnnnnnnnnnnnnnnnnnnnnnnnnnnnnnnnnnnnnnnnnnnnnnnnnnnnnnnnnnnnnnnnnnnnnnnnnnnnnnnnnnnnnnnnnnnnnnnnnnnnnnnnnnnnnnnnnnnnnnnnnnnnnnnnnnnnnnnnnnnnnnnnnnnnnnnnnnnnnnnnnnnnnnnnnnnnnnnnnnnnnnnnnnnnnnnnnnnnnnnnnnnnnnnnnnnnnnnnnnnnnnnnnnnnnnnnnnnnnnnnnnnnnnnnnnnnnnnnnnnnnnnnnnnnnnnnnnnnnnnnnnnnnnnnnnnnnnnnnnnnnnnnnnnnnnnnnnnnnnnnnnnnnnnnnnnnnnnnnnnnnnnnnnnnnnnnnnnnnnnnnnnnnnnnnnnnnnnnnnnnnnnnnnnnnnnnnnnnnnnnnnnnnnnnnnnnnnnnnnnnnnnnnnnnnnnnnnnnnnnnnnnnnnnnnnnnnnnnnnnnnnnnnnnnnnnnnnnnnnnnnnnnnnnnnnnnnnnnnnnnnnnnnnnnnnnnnnnnnnnnnnnnnnnnnnnnnnnnnnnnnnnnnnnnnnnnnnnnnnnnnnnnnnnnnnnnnnnnnnnnnnnnnnnnnnnnnnnnnnnnnnnnnnnnnnnnnnnnnnnnnnnnnnnnnnnnnnnnnnnnnnnnnnnnnnnnnnnnnnnnnnnnnnnnnnnnnnnnnnnnnnnnnnnnnnnnnnnnnnnnnnnnnnnnnnnnnnnnnnnnnnnnnnnnnnnnnnnnnnnnnnnnnnnnnnnnnnnnnnnnnnnnnnnnnnnnnnnnnnnnnnnnnnnnnnnnnnnnnnnnnnnnnnnnnnnnnnnnnnnnnnnnnnnnnnnnnnnnnnnnnnnnnnnnnnnnnnnnnnnnnnnnnnnnnnnnnnnnnnnnnnnnnnnnnnnnnnnnnnnnnnnnnnnnnnnnnnnnnnnnnnnnnnnnnnnnnnnnnnnnnnnnnnnnnnnnnnnnnnnnnnnnnnnnnnnnnnnnnnnnnnnnnnnnnnnnnnnnnnnnnnnnnnnnnnnnnnnnnnnnnnnnnnnnnnnnnnnnnnnnnnnnnnnnnnnnnnnnnnnnnnnnnnnnnnnnnnnnnnnnnnnnnnnnnnnnnnnnnnnnnnnnnnnnnnnnnnnnnnnnnnnnnnnnnnnnnnnnnnnnnnnnnnnnnnnnnnnnnnnnnnnnnnnnnnnnnnnnnnnnnnnnnnnnnnnnnnnnnnnnnnnnnnnnnnnnnnnnnnnnnnnnnnnnnnnnnnnnnnnnnnnnnnnnnnnnnnnnnnnnnnnnnnnnnnnnnnnnnnnnnnnnnnnnnnnnnnnnnnnnnnnnnnnnnnnnnnnnnnnnnnnnnnnnnnnnnnnnnnnnnnnnnnnnnnnnnnnnnnnnnnnnnnnnnnnnnnnnnnnnnnnnnnnnnnnnnnnnnnnnnnnnnnnnnnnnnnnnnnnnnnnnnnnnnnnnnnnnnnnnnnnnnnnnnnnnnnnnnnnnnnnnnnnnnnnnnnnnnnnnnnnnnnnnnnnnnnnnnnnnnnnnnnnnnnnnnnnnnnnnnnnnnnnnnnnnnnnnnnnnnnnnnnnnnnnnnnnnnnnnnnnnnnnnnnnnnnnnnnnnnnnnnnnnnnnnnnnnnnnnnnnnnnnnnnnnnnnnnnnnnnnnnnnnnnnnnnnnnnnnnnnnnnnnnnnnnnnnnnnnnnnnnnnnnnnnnnnnnnnnnnnnnnnnnnnnnnnnnnnnnnnnnnnnnnnnnnnnnnnnnnnnnnnnnnnnnnnnnnnnnnnnnnnnnnnnnnnnnnnnnnnnnnnnnnnnnnnnnnnnnnnnnnnnnnnnnnnnnnnnnnnnnnnnnnnnnnnnnnnnnnnnnnnnnnnnnnnnnnnnnnnnnnnnnnnnnnnnnnnnnnnnnnnnnnnnnnnnnnnnnnnnnnnnnnnnnnnnnnnnnnnnnnnnnnnnnnnnnnnnnnnnnnnnnnnnnnnnnnnnnnnnnnnnnnnnnnnnnnnnnnnnnnnnnnnnnnnnnnnnnnnnnnnnnnnnnnnnnnnnnnnnnnnnnnnnnnnnnnnnnnnnnnnnnnnnnnnnnnnnnnnnnnnnnnnnnnnnnnnnnnnnnnnnnnnnnnnnnnnnnnnnnnnnnnnnnnnnnnnnnnnnnnnnnnnnnnnnnnnnnnnnnnnnnnnnnnnnnnnnnnnnnnnnnnnnnnnnnnnnnnnnnnnnnnnnnnnnnnnnnnnnnnnnnnnnnnnnnnnnnnnnnnnnnnnnnnnnnnnnnnnnnnnnnnnnnnnnnnnnnnnnnnnnnnnnnnnnnnnnnnnnnnnnnnnnnnnnnnnnnnnnnnnnnnnnnnnnnnnnnnnnnnnnnnnnnnnnnnnnnnnnnnnnnnnnnnnnnnnnnnnnnnnnnnnnnnnnnnnnnnnnnnnnnnnnnnnnnnnnnnnnnnnnnnnnnnnnnnnnnnnnnnnnnnnnnnnnnnnnnnnnnnnnnnnnnnnnnnnnnnnnnnnnnnnnnnnnnnnnnnnnnnnnnnnnnnnnnnnnnnnnnnnnnnnnnnnnnnnnnnnnnnnnnnnnnnnnnnnnnnnnnnnnnnnnnnnnnnnnnnnnnnnnnnnnnnnnnnnnnnnnnnnnnnnnnnnnnnnnnnnnnnnnnnnnnnnnnnnnnnnnnnnnnnnnnnnnnnnnnnnnnnnnnnnnnnnnnnnnnnnnnnnnnnnnnnnnnnnnnnnnnnnnnnnnnnnnnnnnnnnnnnnnnnnnnnnnnnnnnnnnnnnnnnnnnnnnnnnnnnnnnnnnnnnnnnnnnnnnnnnnnnnnnnnnnnnnnnnnnnnnnnnnnnnnnnnnnnnnnnnnnnnnnnnnnnnnnnnnnnnnnnnnnnnnnnnnnnnnnnnnnnnnnnnnnnnnnnnnnnnnnnnnnnnnnnnnnnnnnnnnnnnnnnnnnnnnnnnnnnnnnnnnnnnnnnnnnnnnnnnnnnnnnnnnnnnnnnnnnnnnnnnnnnnnnnnnnnnnnnnnnnnnnnnnnnnnnnnnnnnnnnnnnnnnnnnnnnnnnnnnnnnnnnnnnnnnnnnnnnnnnnnnnnnnnnnnnnnnnnnnnnnnnnnnnnnnnnnnnnnnnnnnnnnnnnnnnnnnnnnnnnnnnnnnnnnnnnnnnnnnnnnnnnnnnnnnnnnnnnnnnnnnnnnnnnnnnnnnnnnnnnnnnnnnnnnnnnnnnnnnnnnnnnnnnnnnnnnnnnnnnnnnnnnnnnnnnnnnnnnnnnnnnnnnnnnnnnnnnnnnnnnnnnnnnnnnnnnnnnnnnnnnnnnnnnnnnnnnnnnnnnnnnnnnnnnnnnnnnnnnnnnnnnnnnnnnnnnnnnnnnnnnnnnnnnnnnnnnnnnnnnnnnnnnnnnnnnnnnnnnnnnnnnnnnnnnnnnnnnnnnnnnnnnnnnnnnnnnnnnnnnnnnnnnnnnnnnnnnnnnnnnnnnnnnnnnnnnnnnnnnnnnnnnnnnnnnnnnnnnnnnnnnnnnnnnnnnnnnnnnnnnnnnnnnnnnnnnnnnnnnnnnnnnnnnnnnnnnnnnnnnnnnnnnnnnnnnnnnnnnnnnnnnnnnnnnnnnnnnnnnnnnnnnnnnnnnnnnnnnnnnnnnnnnnnnnnnnnnnnnnnnnnnnnnnnnnnnnnnnnnnnnnnnnnnnnnnnnnnnnnnnnnnnnnnnnnnnnnnnnnnnnnnnnnnnnnnnnnnnnnnnnnnnnnnnnnnnnnnnnnnnnnnnnnnnnnnnnnnnnnnnnnnnnnnnnnnnnnnnnnnnnnnnnnnnnnnnnnnnnnnnnnnnnnnnnnnnnnnnnnnnnnnnnnnnnnnnnnnnnnnnnnnnnnnnnnnnnnnnnnnnnnnnnnnnnnnnnnnnnnnnnnnnnnnnnnnnnnnnnnnnnnnnnnnnnnnnnnnnnnnnnnnnnnnnnnnnnnnnnnnnnnnnnnnnnnnnnnnnnnnnnnnnnnnnnnnnnnnnnnnnnnnnnnnnnnnnnnnnnnnnnnnnnnnnnnnnnnnnnnnnnnnnnnnnnnnnnnnnnnnnnnnnnnnnnnnnnnnnnnnnnnnnnnnnnnnnnnnnnnnnnnnnnnnnnnnnnnnnnnnnnnnnnnnnnnnnnnnnnnnnnnnnnnnnnnnnnnnnnnnnnnnnnnnnnnnnnnnnnnnnnnnnnnnnnnnnnnnnnnnnnnnnnnnnnnnnnnnnnnnnnnnnnnnnnnnnnnnnnnnnnnnnnnnnnnnnnnnnnnnnnnnnnnnnnnnnnnnnnnnnnnnnnnnnnnnnnnnnnnnnnnnnnnnnnnnnnnnnnnnnnnnnnnnnnnnnnnnnnnnnnnnnnnnnnnnnnnnnnnnnnnnnnnnnnnnnnnnnnnnnnnnnnnnnnnnnnnnnnnnnnnnnnnnnnnnnnnnnnnnnnnnnnnnnnnnnnnnnnnnnnnnnnnnnnnnnnnnnnnnnnnnnnnnnnnnnnnnnnnnnnnnnnnnnnnnnnnnnnnnnnnnnnnnnnnnnnnnnnnnnnnnnnnnnnnnnnnnnnnnnnnnnnnnnnnnnnnnnnnnnnnnnnnnnnnnnnnnnnnnnnnnnnnnnnnnnnnnnnnnnnnnnnnnnnnnnnnnnnnnnnnnnnnnnnnnnnnnnnnnnnnnnnnnnnnnnnnnnnnnnnnnnnnnnnnnnnnnnnnnnnnnnnnnnnnnnnnnnnnnnnnnnnnnnnnnnnnnnnnnnnnnnnnnnnnnnnnnnnnnnnnnnnnnnnnnnnnnnnnnnnnnnnnnnnnnnnnnnnnnnnnnnnnnnnnnnnnnnnnnnnnnnnnnnnnnnnnnnnnnnnnnnnnnnnnnnnnnnnnnnnnnnnnnnnnnnnnnnnnnnnnnnnnnnnnnnnnnnnnnnnnnnnnnnnnnnnnnnnnnnnnnnnnnnnnnnnnnnnnnnnnnnnnnnnnnnnnnnnnnnnnnnnnnnnnnnnnnnnnnnnnnnnnnnnnnnnnnnnnnnnnnnnnnnnnnnnnnnnnnnnnnnnnnnnnnnnnnnnnnnnnnnnnnnnnnnnnnnnnnnnnnnnnnnnnnnnnnnnnnnnnnnnnnnnnnnnnnnnnnnnnnnnnnnnnnnnnnnnnnnnnnnnnnnnnnnnnnnnnnnnnnnnnnnnnnnnnnnnnnnnnnnnnnnnnnnnnnnnnnnnnnnnnnnnnnnnnnnnnnnnnnnnnnnnnnnnnnnnnnnnnnnnnnnnnnnnnnnnnnnnnnnnnnnnnnnnnnnnnnnnnnnnnnnnnnnnnnnnnnnnnnnnnnnnnnnnnnnnnnnnnnnnnnnnnnnnnnnnnnnnnnnnnnnnnnnnnnnnnnnnnnnnnnnnnnnnnnnnnnnnnnnnnnnnnnnnnnnnnnnnnnnnnnnnnnnnnnnnnnnnnnnnnnnnnnnnnnnnnnnnnnnnnnnnnnnnnnnnnnnnnnnnnnnnnnnnnnnnnnnnnnnnnnnnnnnnnnnnnnnnnnnnnnnnnnnnnnnnnnnnnnnnnnnnnnnnnnnnnnnnnnnnnnnnnnnnnnnnnnnnnnnnnnnnnnnnnnnnnnnnnnnnnnnnnnnnnnnnnnnnnnnnnnnnnnnnnnnnnnnnnnnnnnnnnnnnnnnnnnnnnnnnnnnnnnnnnnnnnnnnnnnnnnnnnnnnnnnnnnnnnnnnnnnnnnnnnnnnnnnnnnnnnnnnnnnnnnnnnnnnnnnnnnnnnnnnnnnnnnnnnnnnnnnnnnnnnnnnnnnnnnnnnnnnnnnnnnnnnnnnnnnnnnnnnnnnnnnnnnnnnnnnnnnnnnnnnnnnnnnnnnnnnnnnnnnnnnnnnnnnnnnnnnnnnnnnnnnnnnnnnnnnnnnnnnnnnnnnnnnnnnnnnnnnnnnnnnnnnnnnnnnnnnnnnnnnnnnnnnnnnnnnnnnnnnnnnnnnnnnnnnnnnnnnnnnnnnnnnnnnnnnnnnnnnnnnnnnnnnnnnnnnnnnnnnnnnnnnnnnnnnnnnnnnnnnnnnnnnnnnnnnnnnnnnnnnnnnnnnnnnnnnnnnnnnnnnnnnnnnnnnnnnnnnnnnnnnnnnnnnnnnnnnnnnnnnnnnnnnnnnnnnnnnnnnnnnnnnnnnnnnnnnnnnnnnnnnnnnnnnnnnnnnnnnnnnnnnnnnnnnnnnnnnnnnnnnnnnnnnnnnnnnnnnnnnnnnnnnnnnnnnnnnnnnnnnnnnnnnnnnnnnnnnnnnnnnnnnnnnnnnnnnnnnnnnnnnnnnnnnnnnnnnnnnnnnnnnnnnnnnnnnnnnnnnnnnnnnnnnnnnnnnnnnnnnnnnnnnnnnnnnnnnnnnnnnnnnnnnnnnnnnnnnnnnnnnnnnnnnnnnnnnnnnnnnnnnnnnnnnnnnnnnnnnnnnnnnnnnnnnnnnnnnnnnnnnnnnnnnnnnnnnnnnnnnnnnnnnnnnnnnnnnnnnnnnnnnnnnnnnnnnnnnnnnnnnnnnnnnnnnnnnnnnnnnnnnnnnnnnnnnnnnnnnnnnnnnnnnnnnnnnnnnnnnnnnnnnnnnnnnnnnnnnnnnnnnnnnnnnnnnnnnnnnnnnnnnnnnnnnnnnnnnnnnnnnnnnnnnnnnnnnnnnnnnnnnnnnnnnnnnnnnnnnnnnnnnnnnnnnnnnnnnnnnnnnnnnnnnnnnnnnnnnnnnnnnnnnnnnnnnnnnnnnnnnnnnnnnnnnnnnnnnnnnnnnnnnnnnnnnnnnnnnnnnnnnnnnnnnnnnnnnnnnnnnnnnnnnnnnnnnnnnnnnnnnnnnnnnnnnnnnnnnnnnnnnnnnnnnnnnnnnnnnnnnnnnnnnnnnnnnnnnnnnnnnnnnnnnnnnnnnnnnnnnnnnnnnnnnnnnnnnnnnnnnnnnnnnnnnnnnnnnnnnnnnnnnnnnnnnnnnnnnnnnnnnnnnnnnnnnnnnnnnnnnnnnnnnnnnnnnnnnnnnnnnnnnnnnnnnnnnnnnnnnnnnnnnnnnnnnnnnnnnnnnnnnnnnnnnnnnnnnnnnnnnnnnnnnnnnnnnnnnnnnnnnnnnnnnnnnnnnnnnnnnnnnnnnnnnnnnnnnnnnnnnnnnnnnnnnnnnnnnnnnnnnnnnnnnnnnnnnnnnnnnnnnnnnnnnnnnnnnnnnnnnnnnnnnnnnnnnnnnnnnnnnnnnnnnnnnnnnnnnnnnnnnnnnnnnnnnnnnnnnnnnnnnnnnnnnnnnnnnnnnnnnnnnnnnnnnnnnnnnnnnnnnnnnnnnnnnnnnnnnnnnnnnnnnnnnnnnnnnnnnnnnnnnnnnnnnnnnnnnnnnnnnnnnnnnnnnnnnnnnnnnnnnnnnnnnnnnnnnnnnnnnnnnnnnnnnnnnnnnnnnnnnnnnnnnnnnnnnnnnnnnnnnnnnnnnnnnnnnnnnnnnnnnnnnnnnnnnnnnnnnnnnnnnnnnnnnnnnnnnnnnnnnnnnnnnnnnnnnnnnnnnnnnnnnnnnnnnnnnnnnnnnnnnnnnnnnnnnnnnnnnnnnnnnnnnnnnnnnnnnnnnnnnnnnnnnnnnnnnnnnnnnnnnnnnnnnnnnnnnnnnnnnnnnnnnnnnnnnnnnnnnnnnnnnnnnnnnnnnnnnnnnnnnnnnnnnnnnnnnnnnnnnnnnnnnnnnnnnnnnnnnnnnnnnnnnnnnnnnnnnnnnnnnnnnnnnnnnnnnnnnnnnnnnnnnnnnnnnnnnnnnnnnnnnnnnnnnnnnnnnnnnnnnnnnnnnnnnnnnnnnnnnnnnnnnnnnnnnnnnnnnnnnnnnnnnnnnnnnnnnnnnnnnnnnnnnnnnnnnnnnnnnnnnnnnnnnnnnnnnnnnnnnnnnnnnnnnnnnnnnnnnnnnnnnnnnnnnnnnnnnnnnnnnnnnnnnnnnnnnnnnnnnnnnnnnnnnnnnnnnnnnnnnnnnnnnnnnnnnnnnnnnnnnnnnnnnnnnnnnnnnnnnnnnnnnnnnnnnnnnnnnnnnnnnnnnnnnnnnnnnnnnnnnnnnnnnnnnnnnnnnnnnnnnnnnnnnnnnnnnnnnnnnnnnnnnnnnnnnnnnnnnnnnnnnnnnnnnnnnnnnnnnnnnnnnnnnnnnnnnnnnnnnnnnnnnnnnnnnnnnnnnnnnnnnnnnnnnnnnnnnnnnnnnnnnnnnnnnnnnnnnnnnnnnnnnnnnnnnnnnnnnnnnnnnnnnnnnnnnnnnnnnnnnnnnnnnnnnnnnnnnnnnnnnnnnnnnnnnnnnnnnnnnnnnnnnnnnnnnnnnnnnnnnnnnnnnnnnnnnnnnnnnnnnnnnnnnnnnnnnnnnnnnnnnnnnnnnnnnnnnnnnnnnnnnnnnnnnnnnnnnnnnnnnnnnnnnnnnnnnnnnnnnnnnnnnnnnnnnnnnnnnnnnnnnnnnnnnnnnnnnnnnnnnnnnnnnnnnnnnnnnnnnnnnnnnnnnnnnnnnnnnnnnnnnnnnnnnnnnnnnnnnnnnnnnnnnnnnnnnnnnnnnnnnnnnnnnnnnnnnnnnnnnnnnnnnnnnnnnnnnnnnnnnnnnnnnnnnnnnnnnnnnnnnnnnnnnnnnnnnnnnnnnnnnnnnnnnnnnnnnnnnnnnnnnnnnnnnnnnnnnnnnnnnnnnnnnnnnnnnnnnnnnnnnnnnnnnnnnnnnnnnnnnnnnnnnnnnnnnnnnnnnnnnnnnnnnnnnnnnnnnnnnnnnnnnnnnnnnnnnnnnnnnnnnnnnnnnnnnnnnnnnnnnnnnnnnnnnnnnnnnnnnnnnnnnnnnnnnnnnnnnnnnnnnnnnnnnnnnnnnnnnnnnnnnnnnnnnnnnnnnnnnnnnnnnnnnnnnnnnnnnnnnnnnnnnnnnnnnnnnnnnnnnnnnnnnnnnnnnnnnnnnnnnnnnnnnnnnnnnnnnnnnnnnnnnnnnnnnnnnnnnnnnnnnnnnnnnnnnnnnnnnnnnnnnnnnnnnnnnnnnnnnnnnnnnnnnnnnnnnnnnnnnnnnnnnnnnnnnnnnnnnnnnnnnnnnnnnnnnnnnnnnnnnnnnnnnnnnnnnnnnnnnnnnnnnnnnnnnnnnnnnnnnnnnnnnnnnnnnnnnnnnnnnnnnnnnnnnnnnnnnnnnnnnnnnnnnnnnnnnnnnnnnnnnnnnnnnnnnnnnnnnnnnnnnnnnnnnnnnnnnnnnnnnnnnnnnnnnnnnnnnnnnnnnnnnnnnnnnnnnnnnnnnnnnnnnnnnnnnnnnnnnnnnnnnnnnnnnnnnnnnnnnnnnnnnnnnnnnnnnnnnnnnnnnnnnnnnnnnnnnnnnnnnnnnnnnnnnnnnnnnnnnnnnnnnnnnnnnnnnnnnnnnnnnnnnnnnnnnnnnnnnnnnnnnnnnnnnnnnnnnnnnnnnnnnnnnnnnnnnnnnnnnnnnnnnnnnnnnnnnnnnnnnnnnnnnnnnnnnnnnnnnnnnnnnnnnnnnnnnnnnnnnnnnnnnnnnnnnnnnnnnnnnnnnnnnnnnnnnnnnnnnnnnnnnnnnnnnnnnnnnnnnnnnnnnnnnnnnnnnnnnnnnnnnnnnnnnnnnnnnnnnnnnnnnnnnnnnnnnnnnnnnnnnnnnnnnnnnnnnnnnnnnnnnnnnnnnnnnnnnnnnnnnnnnnnnnnnnnnnnnnnnnnnnnnnnnnnnnnnnnnnnnnnnnnnnnnnnnnnnnnnnnnnnnnnnnnnnnnnnnnnnnnnnnnnnnnnnnnnnnnnnnnnnnnnnnnnnnnnnnnnnnnnnnnnnnnnnnnnnnnnnnnnnnnnnnnnnnnnnnnnnnnnnnnnnnnnnnnnnnnnnnnnnnnnnnnnnnnnnnnnnnnnnnnnnnnnnnnnnnnnnnnnnnnnnnnnnnnnnnnnnnnnnnnnnnnnnnnnnnnnnnnnnnnnnnnnnnnnnnnnnnnnnnnnnnnnnnnnnnnnnnnnnnnnnnnnnnnnnnnnnnnnnnnnnnnnnnnnnnnnnnnnnnnnnnnnnnnnnnnnnnnnnnnnnnnnnnnnnnnnnnnnnnnnnnnnnnnnnnnnnnnnnnnnnnnnnnnnnnnnnnnnnnnnnnnnnnnnnnnnnnnnnnnnnnnnnnnnnnnnnnnnnnnnnnnnnnnnnnnnnnnnnnnnnnnnnnnnnnnnnnnnnnnnnnnnnnnnnnnnnnnnnnnnnnnnnnnnnnnnnnnnnnnnnnnnnnnnnnnnnnnnnnnnnnnnnnnnnnnnnnnnnnnnnnnnnnnnnnnnnnnnnnnnnnnnnnnnnnnnnnnnnnnnnnnnnnnnnnnnnnnnnnnnnnnnnnnnnnnnnnnnnnnnnnnnnnnnnnnnnnnnnnnnnnnnnnnnnnnnnnnnnnnnnnnnnnnnnnnnnnnnnnnnnnnnnnnnnnnnnnnnnnnnnnnnnnnnnnnnnnnnnnnnnnnnnnnnnnnnnnnnnnnnnnnnnnnnnnnnnnnnnnnnnnnnnnnnnnnnnnnnnnnnnnnnnnnnnnnnnnnnnnnnnnnnnnnnnnnnnnnnnnnnnnnnnnnnnnnnnnnnnnnnnnnnnnnnnnnnnnnnnnnnnnnnnnnnnnnnnnnnnnnnnnnnnnnnnnnnnnnnnnnnnnnnnnnnnnnnnnnnnnnnnnnnnnnnnnnnnnnnnnnnnnnnnnnnnnnnnnnnnnnnnnnnnnnnnnnnnnnnnnnnnnnnnnnnnnnnnnnnnnnnnnnnnnnnnnnnnnnnnnnnnnnnnnnnnnnnnnnnnnnnnnnnnnnnnnnnnnnnnnnnnnnnnnnnnnnnnnnnnnnnnnnnnnnnnnnnnnnnnnnnnnnnnnnnnnnnnnnnnnnnnnnnnnnnnnnnnnnnnnnnnnnnnnnnnnnnnnnnnnnnnnnnnnnnnnnnnnnnnnnnnnnnnnnnnnnnnnnnnnnnnnnnnnnnnnnnnnnnnnnnnnnnnnnnnnnnnnnnnnnnnnnnnnnnnnnnnnnnnnnnnnnnnnnnnnnnnnnnnnnnnnnnnnnnnnnnnnnnnnnnnnnnnnnnnnnnnnnnnnnnnnnnnnnnnnnnnnnnnnnnnnnnnnnnnnnnnnnnnnnnnnnnnnnnnnnnnnnnnnnnnnnnnnnnnnnnnnnnnnnnnnnnnnnnnnnnnnnnnnnnnnnnnnnnnnnnnnnnnnnnnnnnnnnnnnnnnnnnnnnnnnnnnnnnnnnnnnnnnnnnnnnnnnnnnnnnnnnnnnnnnnnnnnnnnnnnnnnnnnnnnnnnnnnnnnnnnnnnnnnnnnnnnnnnnnnnnnnnnnnnnnnnnnnnnnnnnnnnnnnnnnnnnnnnnnnnnnnnnnnnnnnnnnnnnnnnnnnnnnnnnnnnnnnnnnnnnnnnnnnnnnnnnnnnnnnnnnnnnnnnnnnnnnnnnnnnnnnnnnnnnnnnnnnnnnnnnnnnnnnnnnnnnnnnnnnnnnnnnnnnnnnnnnnnnnnnnnnnnnnnnnnnnnnnnnnnnnnnnnnnnnnnnnnnnnnnnnnnnnnnnnnnnnnnnnnnnnnnnnnnnnnnnnnnnnnnnnnnnnnnnnnnnnnnnnnnnnnnnnnnnnnnnnnnnnnnnnnnnnnnnnnnnnnnnnnnnnnnnnnnnnnnnnnnnnnnnnnnnnnnnnnnnnnnnnnnnnnnnnnnnnnnnnnnnnnnnnnnnnnnnnnnnnnnnnnnnnnnnnnnnnnnnnnnnnnnnnnnnnnnnnnnnnnnnnnnnnnnnnnnnnnnnnnnnnnnnnnnnnnnnnnnnnnnnnnnnnnnnnnnnnnnnnnnnnnnnnnnnnnnnnnnnnnnnnnnnnnnnnnnnnnnnnnnnnnnnnnnnnnnnnnnnnnnnnnnnnnnnnnnnnnnnnnnnnnnnnnnnnnnnnnnnnnnnnnnnnnnnnnnnnnnnnnnnnnnnnnnnnnnnnnnnnnnnnnnnnnnnnnnnnnnnnnnnnnnnnnnnnnnnnnnnnnnnnnnnnnnnnnnnnnnnnnnnnnnnnnnnnnnnnnnnnnnnnnnnnnnnnnnnnnnnnnnnnnnnnnnnnnnnnnnnnnnnnnnnnnnnnnnnnnnnnnnnnnnnnnnnnnnnnnnnnnnnnnnnnnnnnnnnnnnnnnnnnnnnnnnnnnnnnnnnnnnnnnnnnnnnnnnnnnnnnnnnnnnnnnnnnnnnnnnnnnnnnnnnnnnnnnnnnnnnnnnnnnnnnnnnnnnnnnnnnnnnnnnnnnnnnnnnnnnnnnnnnnnnnnnnnnnnnnnnnnnnnnnnnnnnnnnnnnnnnnnnnnnnnnnnnnnnnnnnnnnnnnnnnnnnnnnnnnnnnnnnnnnnnnnnnnnnnnnnnnnnnnnnnnnnnnnnnnnnnnnnnnnnnnnnnnnnnnnnnnnnnnnnnnnnnnnnnnnnnnnnnnnnnnnnnnnnnnnnnnnnnnnnnnnnnnnnnnnnnnnnnnnnnnnnnnnnnnnnnnnnnnnnnnnnnnnnnnnnnnnnnnnnnnnnnnnnnnnnnnnnnnnnnnnnnnnnnnnnnnnnnnnnnnnnnnnnnnnnnnnnnnnnnnnnnnnnnnnnnnnnnnnnnnnnnnnnnnnnnnnnnnnnnnnnnnnnnnnnnnnnnnnnnnnnnnnnnnnnnnnnnnnnnnnnnnnnnnnnnnnnnnnnnnnnnnnnnnnnnnnnnnnnnnnnnnnnnnnnnnnnnnnnnnnnnnnnnnnnnnnnnnnnnnnnnnnnnnnnnnnnnnnnnnnnnnnnnnnnnnnnnnnnnnnnnnnnnnnnnnnnnnnnnnnnnnnnnnnnnnnnnnnnnnnnnnnnnnnnnnnnnnnnnnnnnnnnnnnnnnnnnnnnnnnnnnnnnnnnnnnnnnnnnnnnnnnnnnnnnnnnnnnnnnnnnnnnnnnnnnnnnnnnnnnnnnnnnnnnnnnnnnnnnnnnnnnnnnnnnnnnnnnnnnnnnnnnnnnnnnnnnnnnnnnnnnnnnnnnnnnnnnnnnnnnnnnnnnnnnnnnnnnnnnnnnnnnnnnnnnnnnnnnnnnnnnnnnnnnnnnnnnnnnnnnnnnnnnnnnnnnnnnnnnnnnnnnnnnnnnnnnnnnnnnnnnnnnnnnnnnnnnnnnnnnnnnnnnnnnnnnnnnnnnnnnnnnnnnnnnnnnnnnnnnnnnnnnnnnnnnnnnnnnnnnnnnnnnnnnnnnnnnnnnnnnnnnnnnnnnnnnnnnnnnnnnnnnnnnnnnnnnnnnnnnnnnnnnnnnnnnnnnnnnnnnnnnnnnnnnnnnnnnnnnnnnnnnnnnnnnnnnnnnnnnnnnnnnnnnnnnnnnnnnnnnnnnnnnnnnnnnnnnnnnnnnnnnnnnnnnnnnnnnnnnnnnnnnnnnnnnnnnnnnnnnnnnnnnnnnnnnnnnnnnnnnnnnnnnnnnnnnnnnnnnnnnnnnnnnnnnnnnnnnnnnnnnnnnnnnnnnnnnnnnnnnnnnnnnnnnnnnnnnnnnnnnnnnnnnnnnnnnnnnnnnnnnnnnnnnnnnnnnnnnnnnnnnnnnnnnnnnnnnnnnnnnnnnnnnnnnnnnnnnnnnnnnnnnnnnnnnnnnnnnnnnnnnnnnnnnnnnnnnnnnnnnnnnnnnnnnnnnnnnnnnnnnnnnnnnnnnnnnnnnnnnnnnnnnnnnnnnnnnnnnnnnnnnnnnnnnnnnnnnnnnnnnnnnnnnnnnnnnnnnnnnnnnnnnnnnnnnnnnnnnnnnnnnnnnnnnnnnnnnnnnnnnnnnnnnnnnnnnnnnnnnnnnnnnnnnnnnnnnnnnnnnnnnnnnnnnnnnnnnnnnnnnnnnnnnnnnnnnnnnnnnnnnnnnnnnnnnnnnnnnnnnnnnnnnnnnnnnnnnnnnnnnnnnnnnnnnnnnnnnnnnnnnnnnnnnnnnnnnnnnnnnnnnnnnnnnnnnnnnnnnnnnnnnnnnnnnnnnnnnnnnnnnnnnnnnnnnnnnnnnnnnnnnnnnnnnnnnnnnnnnnnnnnnnnnnnnnnnnnnnnnnnnnnnnnnnnnnnnnnnnnnnnnnnnnnnnnnnnnnnnnnnnnnnnnnnnnnnnnnnnnnnnnnnnnnnnnnnnnnnnnnnnnnnnnnnnnnnnnnnnnnnnnnnnnnnnnnnnnnnnnnnnnnnnnnnnnnnnnnnnnnnnnnnnnnnnnnnnnnnnnnnnnnnnnnnnnnnnnnnnnnnnnnnnnnnnnnnnnnnnnnnnnnnnnnnnnnnnnnnnnnnnnnnnnnnnnnnnnnnnnnnnnnnnnnnnnnnnnnnnnnnnnnnnnnnnnnnnnnnnnnnnnnnnnnnnnnnnnnnnnnnnnnnnnnnnnnnnnnnnnnnnnnnnnnnnnnnnnnnnnnnnnnnnnnnnnnnnnnnnnnnnnnnnnnnnnnnnnnnnnnnnnnnnnnnnnnnnnnnnnnnnnnnnnnnnnnnnnnnnnnnnnnnnnnnnnnnnnnnnnnnnnnnnnnnnnnnnnnnnnnnnnnnnnnnnnnnnnnnnnnnnnnnnnnnnnnnnnnnnnnnnnnnnnnnnnnnnnnnnnnnnnnnnnnnnnnnnnnnnnnnnnnnnnnnnnnnnnnnnnnnnnnnnnnnnnnnnnnnnnnnnnnnnnnnnnnnnnnnnnnnnnnnnnnnnnnnnnnnnnnnnnnnnnnnnnnnnnnnnnnnnnnnnnnnnnnnnnnnnnnnnnnnnnnnnnnnnnnnnnnnnnnnnnnnnnnnnnnnnnnnnnnnnnnnnnnnnnnnnnnnnnnnnnnnnnnnnnnnnnnnnnnnnnnnnnnnnnnnnnnnnnnnnnnnnnnnnnnnnnnnnnnnnnnnnnnnnnnnnnnnnnnnnnnnnnnnnnnnnnnnnnnnnnnnnnnnnnnnnnnnnnnnnnnnnnnnnnnnnnnnnnnnnnnnnnnnnnnnnnnnnnnnnnnnnnnnnnnnnnnnnnnnnnnnnnnnnnnnnnnnnnnnnnnnnnnnnnnnnnnnnnnnnnnnnnnnnnnnnnnnnnnnnnnnnnnnnnnnnnnnnnnnnnnnnnnnnnnnnnnnnnnnnnnnnnnnnnnnnnnnnnnnnnnnnnnnnnnnnnnnnnnnnnnnnnnnnnnnnnnnnnnnnnnnnnnnnnnnnnnnnnnnnnnnnnnnnnnnnnnnnnnnnnnnnnnnnnnnnnnnnnnnnnnnnnnnnnnnnnnnnnnnnnnnnnnnnnnnnnnnnnnnnnnnnnnnnnnnnnnnnnnnnnnnnnnnnnnnnnnnnnnnnnnnnnnnnnnnnnnnnnnnnnnnnnnnnnnnnnnnnnnnnnnnnnnnnnnnnnnnnnnnnnnnnnnnnnnnnnnnnnnnnnnnnnnnnnnnnnnnnnnnnnnnnnnnnnnnnnnnnnnnnnnnnnnnnnnnnnnnnnnnnnnnnnnnnnnnnnnnnnnnnnnnnnnnnnnnnnnnnnnnnnnnnnnnnnnnnnnnnnnnnnnnnnnnnnnnnnnnnnnnnnnnnnnnnnnnnnnnnnnnnnnnnnnnnnnnnnnnnnnnnnnnnnnnnnnnnnnnnnnnnnnnnnnnnnnnnnnnnnnnnnnnnnnnnnnnnnnnnnnnnnnnnnnnnnnnnnnnnnnnnnnnnnnnnnnnnnnnnnnnnnnnnnnnnnnnnnnnnnnnnnnnnnnnnnnnnnnnnnnnnnnnnnnnnnnnnnnnnnnnnnnnnnnnnnnnnnnnnnnnnnnnnnnnnnnnnnnnnnnnnnnnnnnnnnnnnnnnnnnnnnnnnnnnnnnnnnnnnnnnnnnnnnnnnnnnnnnnnnnnnnnnnnnnnnnnnnnnnnnnnnnnnnnnnnnnnnnnnnnnnnnnnnnnnnnnnnnnnnnnnnnnnnnnnnnnnnnnnnnnnnnnnnnnnnnnnnnnnnnnnnnnnnnnnnnnnnnnnnnnnnnnnnnnnnnnnnnnnnnnnnnnnnnnnnnnnnnnnnnnnnnnnnnnnnnnnnnnnnnnnnnnnnnnnnnnnnnnnnnnnnnnnnnnnnnnnnnnnnnnnnnnnnnnnnnnnnnnnnnnnnnnnnnnnnnnnnnnnnnnnnnnnnnnnnnnnnnnnnnnnnnnnnnnnnnnnnnnnnnnnnnnnnnnnnnnnnnnnnnnnnnnnnnnnnnnnnnnnnnnnnnnnnnnnnnnnnnnnnnnnnnnnnnnnnnnnnnnnnnnnnnnnnnnnnnnnnnnnnnnnnnnnnnnnnnnnnnnnnnnnnnnnnnnnnnnnnnnnnnnnnnnnnnnnnnnnnnnnnnnnnnnnnnnnnnnnnnnnnnnnnnnnnnnnnnnnnnnnnnnnnnnnnnnnnnnnnnnnnnnnnnnnnnnnnnnnnnnnnnnnnnnnnnnnnnnnnnnnnnnnnnnnnnnnnnnnnnnnnnnnnnnnnnnnnnnnnnnnnnnnnnnnnnnnnnnnnnnnnnnnnnnnnnnnnnnnnnnnnnnnnnnnnnnnnnnnnnnnnnnnnnnnnnnnnnnnnnnnnnnnnnnnnnnnnnnnnnnnnnnnnnnnnnnnnnnnnnnnnnnnnnnnnnnnnnnnnnnnnnnnnnnnnnnnnnnnnnnnnnnnnnnnnnnnnnnnnnnnnnnnnnnnnnnnnnnnnnnnnnnnnnnnnnnnnnnnnnnnnnnnnnnnnnnnnnnnnnnnnnnnnnnnnnnnnnnnnnnnnnnnnnnnnnnnnnnnnnnnnnnnnnnnnnnnnnnnnnnnnnnnnnnnnnnnnnnnnnnnnnnnnnnnnnnnnnnnnnnnnnnnnnnnnnnnnnnnnnnnnnnnnnnnnnnnnnnnnnnnnnnnnnnnnnnnnnnnnnnnnnnnnnnnnnnnnnnnnnnnnnnnnnnnnnnnnnnnnnnnnnnnnnnnnnnnnnnnnnnnnnnnnnnnnnnnnnnnnnnnnnnnnnnnnnnnnnnnnnnnnnnnnnnnnnnnnnnnnnnnnnnnnnnnnnnnnnnnnnnnnnnnnnnnnnnnnnnnnnnnnnnnnnnnnnnnnnnnnnnnnnnnnnnnnnnnnnnnnnnnnnnnnnnnnnnnnnnnnnnnnnnnnnnnnnnnnnnnnnnnnnnnnnnnnnnnnnnnnnnnnnnnnnnnnnnnnnnnnnnnnnnnnnnnnnnnnnnnnnnnnnnnnnnnnnnnnnnnnnnnnnnnnnnnnnnnnnnnnnnnnnnnnnnnnnnnnnnnnnnnnnnnnnnnnnnnnnnnnnnnnnnnnnnnnnnnnnnnnnnnnnnnnnnnnnnnnnnnnnnnnnnnnnnnnnnnnnnnnnnnnnnnnnnnnnnnnnnnnnnnnnnnnnnnnnnnnnnnnnnnnnnnnnnnnnnnnnnnnnnnnnnnnnnnnnnnnnnnnnnnnnnnnnnnnnnnnnnnnnnnnnnnnnnnnnnnnnnnnnnnnnnnnnnnnnnnnnnnnnnnnnnnnnnnnnnnnnnnnnnnnnnnnnnnnnnnnnnnnnnnnnnnnnnnnnnnnnnnnnnnnnnnnnnnnnnnnnnnnnnnnnnnnnnnnnnnnnnnnnnnnnnnnnnnnnnnnnnnnnnnnnnnnnnnnnnnnnnnnnnnnnnnnnnnnnnnnnnnnnnnnnnnnnnnnnnnnnnnnnnnnnnnnnnnnnnnnnnnnnnnnnnnnnnnnnnnnnnnnnnnnnnnnnnnnnnnnnnnnnnnnnnnnnnnnnnnnnnnnnnnnnnnnnnnnnnnnnnnnnnnnnnnnnnnnnnnnnnnnnnnnnnnnnnnnnnnnnnnnnnnnnnnnnnnnnnnnnnnnnnnnnnnnnnnnnnnnnnnnnnnnnnnnnnnnnnnnnnnnnnnnnnnnnnnnnnnnnnnnnnnnnnnnnnnnnnnnnnnnnnnnnnnnnnnnnnnnnnnnnnnnnnnnnnnnnnnnnnnnnnnnnnnnnnnnnnnnnnnnnnnnnnnnnnnnnnnnnnnnnnnnnnnnnnnnnnnnnnnnnnnnnnnnnnnnnnnnnnnnnnnnnnnnnnnnnnnnnnnnnnnnnnnnnnnnnnnnnnnnnnnnnnnnnnnnnnnnnnnnnnnnnnnnnnnnnnnnnnnnnnnnnnnnnnnnnnnnnnnnnnnnnnnnnnnnnnnnnnnnnnnnnnnnnnnnnnnnnnnnnnnnnnnnnnnnnnnnnnnnnnnnnnnnnnnnnnnnnnnnnnnnnnnnnnnnnnnnnnnnnnnnnnnnnnnnnnnnnnnnnnnnnnnnnnnnnnnnnnnnnnnnnnnnnnnnnnnnnnnnnnnnnnnnnnnnnnnnnnnnnnnnnnnnnnnnnnnnnnnnnnnnnnnnnnnnnnnnnnnnnnnnnnnnnnnnnnnnnnnnnnnnnnnnnnnnnnnnnnnnnnnnnnnnnnnnnnnnnnnnnnnnnnnnnnnnnnnnnnnnnnnnnnnnnnnnnnnnnnnnnnnnnnnnnnnnnnnnnnnnnnnnnnnnnnnnnnnnnnnnnnnnnnnnnnnnnnnnnnnnnnnnnnnnnnnnnnnnnnnnnnnnnnnnnnnnnnnnnnnnnnnnnnnnnnnnnnnnnnnnnnnnnnnnnnnnnnnnnnnnnnnnnnnnnnnnnnnnnnnnnnnnnnnnnnnnnnnnnnnnnnnnnnnnnnnnnnnnnnnnnnnnnnnnnnnnnnnnnnnnnnnnnnnnnnnnnnnnnnnnnnnnnnnnnnnnnnnnnnnnnnnnnnnnnnnnnnnnnnnnnnnnnnnnnnnnnnnnnnnnnnnnnnnnnnnnnnnnnnnnnnnnnnnnnnnnnnnnnnnnnnnnnnnnnnnnnnnnnnnnnnnnnnnnnnnnnnnnnnnnnnnnnnnnnnnnnnnnnnnnnnnnnnnnnnnnnnnnnnnnnnnnnnnnnnnnnnnnnnnnnnnnnnnnnnnnnnnnnnnnnnnnnnnnnnnnnnnnnnnnnnnnnnnnnnnnnnnnnnnnnnnnnnnnnnnnnnnnnnnnnnnnnnnnnnnnnnnnnnnnnnnnnnnnnnnnnnnnnnnnnnnnnnnnnnnnnnnnnnnnnnnnnnnnnnnnnnnnnnnnnnnnnnnnnnnnnnnnnnnnnnnnnnnnnnnnnnnnnnnnnnnnnnnnnnnnnnnnnnnnnnnnnnnnnnnnnnnnnnnnnnnnnnnnnnnnnnnnnnnnnnnnnnnnnnnnnnnnnnnnnnnnnnnnnnnnnnnnnnnnnnnnnnnnnnnnnnnnnnnnnnnnnnnnnnnnnnnnnnnnnnnnnnnnnnnnnnnnnnnnnnnnnnnnnnnnnnnnnnnnnnnnnnnnnnnnnnnnnnnnnnnnnnnnnnnnnnnnnnnnnnnnnnnnnnnnnnnnnnnnnnnnnnnnnnnnnnnnnnnnnnnnnnnnnnnnnnnnnnnnnnnnnnnnnnnnnnnnnnnnnnnnnnnnnnnnnnnnnnnnnnnnnnnnnnnnnnnnnnnnnnnnnnnnnnnnnnnnnnnnnnnnnnnnnnnnnnnnnnnnnnnnnnnnnnnnnnnnnnnnnnnnnnnnnnnnnnnnnnnnnnnnnnnnnnnnnnnnnnnnnnnnnnnnnnnnnnnnnnnnnnnnnnnnnnnnnnnnnnnnnnnnnnnnnnnnnnnnnnnnnnnnnnnnnnnnnnnnnnnnnnnnnnnnnnnnnnnnnnnnnnnnnnnnnnnnnnnnnnnnnnnnnnnnnnnnnnnnnnnnnnnnnnnnnnnnnnnnnnnnnnnnnnnnnnnnnnnnnnnnnnnnnnnnnnnnnnnnnnnnnnnnnnnnnnnnnnnnnnnnnnnnnnnnnnnnnnnnnnnnnnnnnnnnnnnnnnnnnnnnnnnnnnnnnnnnnnnnnnnnnnnnnnnnnnnnnnnnnnnnnnnnnnnnnnnnnnnnnnnnnnnnnnnnnnnnnnnnnnnnnnnnnnnnnnnnnnnnnnnnnnnnnnnnnnnnnnnnnnnnnnnnnnnnnnnnnnnnnnnnnnnnnnnnnnnnnnnnnnnnnnnnnnnnnnnnnnnnnnnnnnnnnnnnnnnnnnnnnnnnnnnnnnnnnnnnnnnnnnnnnnnnnnnnnnnnnnnnnnnnnnnnnnnnnnnnnnnnnnnnnnnnnnnnnnnnnnnnnnnnnnnnnnnnnnnnnnnnnnnnnnnnnnnnnnnnnnnnnnnnnnnnnnnnnnnnnnnnnnnnnnnnnnnnnnnnnnnnnnnnnnnnnnnnnnnnnnnnnnnnnnnnnnnnnnnnnnnnnnnnnnnnnnnnnnnnnnnnnnnnnnnnnnnnnnnnnnnnnnnnnnnnnnnnnnnnnnnnnnnnnnnnnnnnnnnnnnnnnnnnnnnnnnnnnnnnnnnnnnnnnnnnnnnnnnnnnnnnnnnnnnnnnnnnnnnnnnnnnnnnnnnnnnnnnnnnnnnnnnnnnnnnnnnnnnnnnnnnnnnnnnnnnnnnnnnnnnnnnnnnnnnnnnnnnnnnnnnnnnnnnnnnnnnnnnnnnnnnnnnnnnnnnnnnnnnnnnnnnnnnnnnnnnnnnnnnnnnnnnnnnnnnnnnnnnnnnnnnnnnnnnnnnnnnnnnnnnnnnnnnnnnnnnnnnnnnnnnnnnnnnnnnnnnnnnnnnnnnnnnnnnnnnnnnnnnnnnnnnnnnnnnnnnnnnnnnnnnnnnnnnnnnnnnnnnnnnnnnnnnnnnnnnnnnnnnnnnnnnnnnnnnnnnnnnnnnnnnnnnnnnnnnnnnnnnnnnnnnnnnnnnnnnnnnnnnnnnnnnnnnnnnnnnnnnnnnnnnnnnnnnnnnnnnnnnnnnnnnnnnnnnnnnnnnnnnnnnnnnnnnnnnnnnnnnnnnnnnnnnnnnnnnnnnnnnnnnnnnnnnnnnnnnnnnnnnnnnnnnnnnnnnnnnnnnnnnnnnnnnnnnnnnnnnnnnnnnnnnnnnnnnnnnnnnnnnnnnnnnnnnnnnnnnnnnnnnnnnnnnnnnnnnnnnnnnnnnnnnnnnnnnnnnnnnnnnnnnnnnnnnnnnnnnnnnnnnnnnnnnnnnnnnnnnnnnnnnnnnnnnnnnnnnnnnnnnnnnnnnnnnnnnnnnnnnnnnnnnnnnnnnnnnnnnnnnnnnnnnnnnnnnnnnnnnnnnnnnnnnnnnnnnnnnnnnnnnnnnnnnnnnnnnnnnnnnnnnnnnnnnnnnnnnnnnnnnnnnnnnnnnnnnnnnnnnnnnnnnnnnnnnnnnnnnnnnnnnnnnnnnnnnnnnnnnnnnnnnnnnnnnnnnnnnnnnnnnnnnnnnnnnnnnnnnnnnnnnnnnnnnnnnnnnnnnnnnnnnnnnnnnnnnnnnnnnnnnnnnnnnnnnnnnnnnnnnnnnnnnnnnnnnnnnnnnnnnnnnnnnnnnnnnnnnnnnnnnnnnnnnnnnnnnnnnnnnnnnnnnnnnnnnnnnnnnnnnnnnnnnnnnnnnnnnnnnnnnnnnnnnnnnnnnnnnnnnnnnnnnnnnnnnnnnnnnnnnnnnnnnnnnnnnnnnnnnnnnnnnnnnnnnnnnnnnnnnnnnnnnnnnnnnnnnnnnnnnnnnnnnnnnnnnnnnnnnnnnnnnnnnnnnnnnnnnnnnnnnnnnnnnnnnnnnnnnnnnnnnnnnnnnnnnnnnnnnnnnnnnnnnnnnnnnnnnnnnnnnnnnnnnnnnnnnnnnnnnnnnnnnnnnnnnnnnnnnnnnnnnnnnnnnnnnnnnnnnnnnnnnnnnnnnnnnnnnnnnnnnnnnnnnnnnnnnnnnnnnnnnnnnnnnnnnnnnnnnnnnnnnnnnnnnnnnnnnnnnnnnnnnnnnnnnnnnnnnnnnnnnnnnnnnnnnnnnnnnnnnnnnnnnnnnnnnnnnnnnnnnnnnnnnnnnnnnnnnnnnnnnnnnnnnnnnnnnnnnnnnnnnnnnnnnnnnnnnnnnnnnnnnnnnnnnnnnnnnnnnnnnnnnnnnnnnnnnnnnnnnnnnnnnnnnnnnnnnnnnnnnnnnnnnnnnnnnnnnnnnnnnnnnnnnnnnnnnnnnnnnnnnnnnnnnnnnnnnnnnnnnnnnnnnnnnnnnnnnnnnnnnnnnnnnnnnnnnnnnnnnnnnnnnnnnnnnnnnnnnnnnnnnnnnnnnnnnnnnnnnnnnnnnnnnnnnnnnnnnnnnnnnnnnnnnnnnnnnnnnnnnnnnnnnnnnnnnnnnnnnnnnnnnnnnnnnnnnnnnnnnnnnnnnnnnnnnnnnnnnnnnnnnnnnnnnnnnnnnnnnnnnnnnnnnnnnnnnnnnnnnnnnnnnnnnnnnnnnnnnnnnnnnnnnnnnnnnnnnnnnnnnnnnnnnnnnnnnnnnnnnnnnnnnnnnnnnnnnnnnnnnnnnnnnnnnnnnnnnnnnnnnnnnnnnnnnnnnnnnnnnnnnnnnnnnnnnnnnnnnnnnnnnnnnnnnnnnnnnnnnnnnnnnnnnnnnnnnnnnnnnnnnnnnnnnnnnnnnnnnnnnnnnnnnnnnnnnnnnnnnnnnnnnnnnnnnnnnnnnnnnnnnnnnnnnnnnnnnnnnnnnnnnnnnnnnnnnnnnnnnnnnnnnnnnnnnnnnnnnnnnnnnnnnnnnnnnnnnnnnnnnnnnnnnnnnnnnnnnnnnnnnnnnnnnnnnnnnnnnnnnnnnnnnnnnnnnnnnnnnnnnnnnnnnnnnnnnnnnnnnnnnnnnnnnnnnnnnnnnnnnnnnnnnnnnnnnnnnnnnnnnnnnnnnnnnnnnnnnnnnnnnnnnnnnnnnnnnnnnnnnnnnnnnnnnnnnnnnnnnnnnnnnnnnnnnnnnnnnnnnnnnnnnnnnnnnnnnnnnnnnnnnnnnnnnnnnnnnnnnnnnnnnnnnnnnnnnnnnnnnnnnnnnnnnnnnnnnnnnnnnnnnnnnnnnnnnnnnnnnnnnnnnnnnnnnnnnnnnnnnnnnnnnnnnnnnnnnnnnnnnnnnnnnnnnnnnnnnnnnnnnnnnnnnnnnnnnnnnnnnnnnnnnnnnnnnnnnnnnnnnnnnnnnnnnnnnnnnnnnnnnnnnnnnnnnnnnnnnnnnnnnnnnnnnnnnnnnnnnnnnnnnnnnnnnnnnnnnnnnnnnnnnnnnnnnnnnnnnnnnnnnnnnnnnnnnnnnnnnnnnnnnnnnnnnnnnnnnnnnnnnnnnnnnnnnnnnnnnnnnnnnnnnnnnnnnnnnnnnnnnnnnnnnnnnnnnnnnnnnnnnnnnnnnnnnnnnnnnnnnnnnnnnnnnnnnnnnnnnnnnnnnnnnnnnnnnnnnnnnnnnnnnnnnnnnnnnnnnnnnnnnnnnnnnnnnnnnnnnnnnnnnnnnnnnnnnnnnnnnnnnnnnnnnnnnnnnnnnnnnnnnnnnnnnnnnnnnnnnnnnnnnnnnnnnnnnnnnnnnnnnnnnnnnnnnnnnnnnnnnnnnnnnnnnnnnnnnnnnnnnnnnnnnnnnnnnnnnnnnnnnnnnnnnnnnnnnnnnnnnnnnnnnnnnnnnnnnnnnnnnnnnnnnnnnnnnnnnnnnnnnnnnnnnnnnnnnnnnnnnnnnnnnnnnnnnnnnnnnnnnnnnnnnnnnnnnnnnnnnnnnnnnnnnnnnnnnnnnnnnnnnnnnnnnnnnnnnnnnnnnnnnnnnnnnnnnnnnnnnnnnnnnnnnnnnnnnnnnnnnnnnnnnnnnnnnnnnnnnnnnnnnnnnnnnnnnnnnnnnnnnnnnnnnnnnnnnnnnnnnnnnnnnnnnnnnnnnnnnnnnnnnnnnnnnnnnnnnnnnnnnnnnnnnnnnnnnnnnnnnnnnnnnnnnnnnnnnnnnnnnnnnnnnnnnnnnnnnnnnnnnnnnnnnnnnnnnnnnnnnnnnnnnnnnnnnnnnnnnnnnnnnnnnnnnnnnnnnnnnnnnnnnnnnnnnnnnnnnnnnnnnnnnnnnnnnnnnnnnnnnnnnnnnnnnnnnnnnnnnnnnnnnnnnnnnnnnnnnnnnnnnnnnnnnnnnnnnnnnnnnnnnnnnnnnnnnnnnnnnnnnnnnnnnnnnnnnnnnnnnnnnnnnnnnnnnnnnnnnnnnnnnnnnnnnnnnnnnnnnnnnnnnnnnnnnnnnnnnnnnnnnnnnnnnnnnnnnnnnnnnnnnnnnnnnnnnnnnnnnnnnnnnnnnnnnnnnnnnnnnnnnnnnnnnnnnnnnnnnnnnnnnnnnnnnnnnnnnnnnnnnnnnnnnnnnnnnnnnnnnnnnnnnnnnnnnnnnnnnnnnnnnnnnnnnnnnnnnnnnnnnnnnnnnnnnnnnnnnnnnnnnnnnnnnnnnnnnnnnnnnnnnnnnnnnnnnnnnnnnnnnnnnnnnnnnnnnnnnnnnnnnnnnnnnnnnnnnnnnnnnnnnnnnnnnnnnnnnnnnnnnnnnnnnnnnnnnnnnnnnnnnnnnnnnnnnnnnnnnnnnnnnnnnnnnnnnnnnnnnnnnnnnnnnnnnnnnnnnnnnnnnnnnnnnnnnnnnnnnnnnnnnnnnnnnnnnnnnnnnnnnnnnnnnnnnnnnnnnnnnnnnnnnnnnnnnnnnnnnnnnnnnnnnnnnnnnnnnnnnnnnnnnnnnnnnnnnnnnnnnnnnnnnnnnnnnnnnnnnnnnnnnnnnnnnnnnnnnnnnnnnnnnnnnnnnnnnnnnnnnnnnnnnnnnnnnnnnnnnnnnnnnnnnnnnnnnnnnnnnnnnnnnnnnnnnnnnnnnnnnnnnnnnnnnnnnnnnnnnnnnnnnnnnnnnnnnnnnnnnnnnnnnnnnnnnnnnnnnnnnnnnnnnnnnnnnnnnnnnnnnnnnnnnnnnnnnnnnnnnnnnnnnnnnnnnnnnnnnnnnnnnnnnnnnnnnnnnnnnnnnnnnnnnnnnnnnnnnnnnnnnnnnnnnnnnnnnnnnnnnnnnnnnnnnnnnnnnnnnnnnnnnnnnnnnnnnnnnnnnnnnnnnnnnnnnnnnnnnnnnnnnnnnnnnnnnnnnnnnnnnnnnnnnnnnnnnnnnnnnnnnnnnnnnnnnnnnnnnnnnnnnnnnnnnnnnnnnnnnnnnnnnnnnnnnnnnnnnnnnnnnnnnnnnnnnnnnnnnnnnnnnnnnnnnnnnnnnnnnnnnnnnnnnnnnnnnnnnnnnnnnnnnnnnnnnnnnnnnnnnnnnnnnnnnnnnnnnnnnnnnnnnnnnnnnnnnnnnnnnnnnnnnnnnnnnnnnnnnnnnnnnnnnnnnnnnnnnnnnnnnnnnnnnnnnnnnnnnnnnnnnnnnnnnnnnnnnnnnnnnnnnnnnnnnnnnnnnnnnnnnnnnnnnnnnnnnnnnnnnnnnnnnnnnnnnnnnnnnnnnnnnnnnnnnnnnnnnnnnnnnnnnnnnnnnnnnnnnnnnnnnnnnnnnnnnnnnnnnnnnnnnnnnnnnnnnnnnnnnnnnnnnnnnnnnnnnnnnnnnnnnnnnnnnnnnnnnnnnnnnnnnnnnnnnnnnnnnnnnnnnnnnnnnnnnnnnnnnnnnnnnnnnnnnnnnnnnnnnnnnnnnnnnnnnnnnnnnnnnnnnnnnnnnnnnnnnnnnnnnnnnnnnnnnnnnnnnnnnnnnnnnnnnnnnnnnnnnnnnnnnnnnnnnnnnnnnnnnnnnnnnnnnnnnnnnnnnnnnnnnnnnnnnnnnnnnnnnnnnnnnnnnnnnnnnnnnnnnnnnnnnnnnnnnnnnnnnnnnnnnnnnnnnnnnnnnnnnnnnnnnnnnnnnnnnnnnnnnnnnnnnnnnnnnnnnnnnnnnnnnnnnnnnnnnnnnnnnnnnnnnnnnnnnnnnnnnnnnnnnnnnnnnnnnnnnnnnnnnnnnnnnnnnnnnnnnnnnnnnnnnnnnnnnnnnnnnnnnnnnnnnnnnnnnnnnnnnnnnnnnnnnnnnnnnnnnnnnnnnnnnnnnnnnnnnnnnnnnnnnnnnnnnnnnnnnnnnnnnnnnnnnnnnnnnnnnnnnnnnnnnnnnnnnnnnnnnnnnnnnnnnnnnnnnnnnnnnnnnnnnnnnnnnnnnnnnnnnnnnnnnnnnnnnnnnnnnnnnnnnnnnnnnnnnnnnnnnnnnnnnnnnnnnnnnnnnnnnnnnnnnnnnnnnnnnnnnnnnnnnnnnnnnnnnnnnnnnnnnnnnnnnnnnnnnnnnnnnnnnnnnnnnnnnnnnnnnnnnnnnnnnnnnnnnnnnnnnnnnnnnnnnnnnnnnnnnnnnnnnnnnnnnnnnnnnnnnnnnnnnnnnnnnnnnnnnnnnnnnnnnnnnnnnnnnnnnnnnnnnnnnnnnnnnnnnnnnnnnnnnnnnnnnnnnnnnnnnnnnnnnnnnnnnnnnnnnnnnnnnnnnnnnnnnnnnnnnnnnnnnnnnnnnnnnnnnnnnnnnnnnnnnnnnnnnnnnnnnnnnnnnnnnnnnnnnnnnnnnnnnnnnnnnnnnnnnnnnnnnnnnnnnnnnnnnnnnnnnnnnnnnnnnnnnnnnnnnnnnnnnnnnnnnnnnnnnnnnnnnnnnnnnnnnnnnnnnnnnnnnnnnnnnnnnnnnnnnnnnnnnnnnnnnnnnnnnnnnnnnnnnnnnnnnnnnnnnnnnnnnnnnnnnnnnnnnnnnnnnnnnnnnnnnnnnnnnnnnnnnnnnnnnnnnnnnnnnnnnnnnnnnnnnnnnnnnnnnnnnnnnnnnnnnnnnnnnnnnnnnnnnnnnnnnnnnnnnnnnnnnnnnnnnnnnnnnnnnnnnnnnnnnnnnnnnnnnnnnnnnnnnnnnnnnnnnnnnnnnnnnnnnnnnnnnnnnnnnnnnnnnnnnnnnnnnnnnnnnnnnnnnnnnnnnnnnnnnnnnnnnnnnnnnnnnnnnnnnnnnnnnnnnnnnnnnnnnnnnnnnnnnnnnnnnnnnnnnnnnnnnnnnnnnnnnnnnnnnnnnnnnnnnnnnnnnnnnnnnnnnnnnnnnnnnnnnnnnnnnnnnnnnnnnnnnnnnnnnnnnnnnnnnnnnnnnnnnnnnnnnnnnnnnnnnnnnnnnnnnnnnnnnnnnnnnnnnnnnnnnnnnnnnnnnnnnnnnnnnnnnnnnnnnnnnnnnnnnnnnnnnnnnnnnnnnnnnnnnnnnnnnnnnnnnnnnnnnnnnnnnnnnnnnnnnnnnnnnnnnnnnnnnnnnnnnnnnnnnnnnnnnnnnnnnnnnnnnnnnnnnnnnnnnnnnnnnnnnnnnnnnnnnnnnnnnnnnnnnnnnnnnnnnnnnnnnnnnnnnnnnnnnnnnnnnnnnnnnnnnnnnnnnnnnnnnnnnnnnnnnnnnnnnnnnnnnnnnnnnnnnnnnnnnnnnnnnnnnnnnnnnnnnnnnnnnnnnnnnnnnnnnnnnnnnnnnnnnnnnnnnnnnnnnnnnnnnnnnnnnnnnnnnnnnnnnnnnnnnnnnnnnnnnnnnnnnnnnnnnnnnnnnnnnnnnnnnnnnnnnnnnnnnnnnnnnnnnnnnnnnnnnnnnnnnnnnnnnnnnnnnnnnnnnnnnnnnnnnnnnnnnnnnnnnnnnnnnnnnnnnnnnnnnnnnnnnnnnnnnnnnnnnnnnnnnnnnnnnnnnnnnnnnnnnnnnnnnnnnnnnnnnnnnnnnnnnnnnnnnnnnnnnnnnnnnnnnnnnnnnnnnnnnnnnnnnnnnnnnnnnnnnnnnnnnnnnnnnnnnnnnnnnnnnnnnnnnnnnnnnnnnnnnnnnnnnnnnnnnnnnnnnnnnnnnnnnnnnnnnnnnnnnnnnnnnnnnnnnnnnnnnnnnnnnnnnnnnnnnnnnnnnnnnnnnnnnnnnnnnnnnnnnnnnnnnnnnnnnnnnnnnnnnnnnnnnnnnnnnnnnnnnnnnnnnnnnnnnnnnnnnnnnnnnnnnnnnnnnnnnnnnnnnnnnnnnnnnnnnnnnnnnnnnnnnnnnnnnnnnnnnnnnnnnnnnnnnnnnnnnnnnnnnnnnnnnnnnnnnnnnnnnnnnnnnnnnnnnnnnnnnnnnnnnnnnnnnnnnnnnnnnnnnnnnnnnnnnnnnnnnnnnnnnnnnnnnnnnnnnnnnnnnnnnnnnnnnnnnnnnnnnnnnnnnnnnnnnnnnnnnnnnnnnnnnnnnnnnnnnnnnnnnnnnnnnnnnnnnnnnnnnnnnnnnnnnnnnnnnnnnnnnnnnnnnnnnnnnnnnnnnnnnnnnnnnnnnnnnnnnnnnnnnnnnnnnnnnnnnnnnnnnnnnnnnnnnnnnnnnnnnnnnnnnnnnnnnnnnnnnnnnnnnnnnnnnnnnnnnnnnnnnnnnnnnnnnnnnnnnnnnnnnnnnnnnnnnnnnnnnnnnnnnnnnnnnnnnnnnnnnnnnnnnnnnnnnnnnnnnnnnnnnnnnnnnnnnnnnnnnnnnnnnnnnnnnnnnnnnnnnnnnnnnnnnnnnnnnnnnnnnnnnnnnnnnnnnnnnnnnnnnnnnnnnnnnnnnnnnnnnnnnnnnnnnnnnnnnnnnnnnnnnnnnnnnnnnnnnnnnnnnnnnnnnnnnnnnnnnnnnnnnnnnnnnnnnnnnnnnnnnnnnnnnnnnnnnnnnnnnnnnnnnnnnnnnnnnnnnnnnnnnnnnnnnnnnnnnnnnnnnnnnnnnnnnnnnnnnnnnnnnnnnnnnnnnnnnnnnnnnnnnnnnnnnnnnnnnnnnnnnnnnnnnnnnnnnnnnnnnnnnnnnnnnnnnnnnnnnnnnnnnnnnnnnnnnnnnnnnnnnnnnnnnnnnnnnnnnnnnnnnnnnnnnnnnnnnnnnnnnnnnnnnnnnnnnnnnnnnnnnnnnnnnnnnnnnnnnnnnnnnnnnnnnnnnnnnnnnnnnnnnnnnnnnnnnnnnnnnnnnnnnnnnnnnnnnnnnnnnnnnnnnnnnnnnnnnnnnnnnnnnnnnnnnnnnnnnnnnnnnnnnnnnnnnnnnnnnnnnnnnnnnnnnnnnnnnnnnnnnnnnnnnnnnnnnnnnnnnnnnnnnnnnnnnnnnnnnnnnnnnnnnnnnnnnnnnnnnnnnnnnnnnnnnnnnnnnnnnnnnnnnnnnnnnnnnnnnnnnnnnnnnnnnnnnnnnnnnnnnnnnnnnnnnnnnnnnnnnnnnnnnnnnnnnnnnnnnnnnnnnnnnnnnnnnnnnnnnnnnnnnnnnnnnnnnnnnnnnnnnnnnnnnnnnnnnnnnnnnnnnnnnnnnnnnnnnnnnnnnnnnnnnnnnnnnnnnnnnnnnnnnnnnnnnnnnnnnnnnnnnnnnnnnnnnnnnnnnnnnnnnnnnnnnnnnnnnnnnnnnnnnnnnnnnnnnnnnnnnnnnnnnnnnnnnnnnnnnnnnnnnnnnnnnnnnnnnnnnnnnnnnnnnnnnnnnnnnnnnnnnnnnnnnnnnnnnnnnnnnnnnnnnnnnnnnnnnnnnnnnnnnnnnnnnnnnnnnnnnnnnnnnnnnnnnnnnnnnnnnnnnnnnnnnnnnnnnnnnnnnnnnnnnnnnnnnnnnnnnnnnnnnnnnnnnnnnnnnnnnnnnnnnnnnnnnnnnnnnnnnnnnnnnnnnnnnnnnnnnnnnnnnnnnnnnnnnnnnnnnnnnnnnnnnnnnnnnnnnnnnnnnnnnnnnnnnnnnnnnnnnnnnnnnnnnnnnnnnnnnnnnnnnnnnnnnnnnnnnnnnnnnnnnnnnnnnnnnnnnnnnnnnnnnnnnnnnnnnnnnnnnnnnnnnnnnnnnnnnnnnnnnnnnnnnnnnnnnnnnnnnnnnnnnnnnnnnnnnnnnnnnnnnnnnnnnnnnnnnnnnnnnnnnnnnnnnnnnnnnnnnnnnnnnnnnnnnnnnnnnnnnnnnnnnnnnnnnnnnnnnnnnnnnnnnnnnnnnnnnnnnnnnnnnnnnnnnnnnnnnnnnnnnnnnnnnnnnnnnnnnnnnnnnnnnnnnnnnnnnnnnnnnnnnnnnnnnnnnnnnnnnnnnnnnnnnnnnnnnnnnnnnnnnnnnnnnnnnnnnnnnnnnnnnnnnnnnnnnnnnnnnnnnnnnnnnnnnnnnnnnnnnnnnnnnnnnnnnnnnnnnnnnnnnnnnnnnnnnnnnnnnnnnnnnnnnnnnnnnnnnnnnnnnnnnnnnnnnnnnnnnnnnnnnnnnnnnnnnnnnnnnnnnnnnnnnnnnnnnnnnnnnnnnnnnnnnnnnnnnnnnnnnnnnnnnnnnnnnnnnnnnnnnnnnnnnnnnnnnnnnnnnnnnnnnnnnnnnnnnnnnnnnnnnnnnnnnnnnnnnnnnnnnnnnnnnnnnnnnnnnnnnnnnnnnnnnnnnnnnnnnnnnnnnnnnnnnnnnnnnnnnnnnnnnnnnnnnnnnnnnnnnnnnnnnnnnnnnnnnnnnnnnnnnnnnnnnnnnnnnnnnnnnnnnnnnnnnnnnnnnnnnnnnnnnnnnnnnnnnnnnnnnnnnnnnnnnnnnnnnnnnnnnnnnnnnnnnnnnnnnnnnnnnnnnnnnnnnnnnnnnnnnnnnnnnnnnnnnnnnnnnnnnnnnnnnnnnnnnnnnnnnnnnnnnnnnnnnnnnnnnnnnnnnnnnnnnnnnnnnnnnnnnnnnnnnnnnnnnnnnnnnnnnnnnnnnnnnnnnnnnnnnnnnnnnnnnnnnnnnnnnnnnnnnnnnnnnnnnnnnnnnnnnnnnnnnnnnnnnnnnnnnnnnnnnnnnnnnnnnnnnnnnnnnnnnnnnnnnnnnnnnnnnnnnnnnnnnnnnnnnnnnnnnnnnnnnnnnnnnnnnnnnnnnnnnnnnnnnnnnnnnnnnnnnnnnnnnnnnnnnnnnnnnnnnnnnnnnnnnnnnnnnnnnnnnnnnnnnnnnnnnnnnnnnnnnnnnnnnnnnnnnnnnnnnnnnnnnnnnnnnnnnnnnnnnnnnnnnnnnnnnnnnnnnnnnnnnnnnnnnnnnnnnnnnnnnnnnnnnnnnnnnnnnnnnnnnnnnnnnnnnnnnnnnnnnnnnnnnnnnnnnnnnnnnnnnnnnnnnnnnnnnnnnnnnnnnnnnnnnnnnnnnnnnnnnnnnnnnnnnnnnnnnnnnnnnnnnnnnnnnnnnnnnnnnnnnnnnnnnnnnnnnnnnnnnnnnnnnnnnnnnnnnnnnnnnnnnnnnnnnnnnnnnnnnnnnnnnnnnnnnnnnnnnnnnnnnnnnnnnnnnnnnnnnnnnnnnnnnnnnnnnnnnnnnnnnnnnnnnnnnnnnnnnnnnnnnnnnnnnnnnnnnnnnnnnnnnnnnnnnnnnnnnnnnnnnnnnnnnnnnnnnnnnnnnnnnnnnnnnnnnnnnnnnnnnnnnnnnnnnnnnnnnnnnnnnnnnnnnnnnnnnnnnnnnnnnnnnnnnnnnnnnnnnnnnnnnnnnnnnnnnnnnnnnnnnnnnnnnnnnnnnnnnnnnnnnnnnnnnnnnnnnnnnnnnnnnnnnnnnnnnnnnnnnnnnnnnnnnnnnnnnnnnnnnnnnnnnnnnnnnnnnnnnnnnnnnnnnnnnnnnnnnnnnnnnnnnnnnnnnnnnnnnnnnnnnnnnnnnnnnnnnnnnnnnnnnnnnnnnnnnnnnnnnnnnnnnnnnnnnnnnnnnnnnnnnnnnnnnnnnnnnnnnnnnnnnnnnnnnnnnnnnnnnnnnnnnnnnnnnnnnnnnnnnnnnnnnnnnnnnnnnnnnnnnnnnnnnnnnnnnnnnnnnnnnnnnnnnnnnnnnnnnnnnnnnnnnnnnnnnnnnnnnnnnnnnnnnnnnnnnnnnnnnnnnnnnnnnnnnnnnnnnnnnnnnnnnnnnnnnnnnnnnnnnnnnnnnnnnnnnnnnnnnnnnnnnnnnnnnnnnnnnnnnnnnnnnnnnnnnnnnnnnnnnnnnnnnnnnnnnnnnnnnnnnnnnnnnnnnnnnnnnnnnnnnnnnnnnnnnnnnnnnnnnnnnnnnnnnnnnnnnnnnnnnnnnnnnnnnnnnnnnnnnnnnnnnnnnnnnnnnnnnnnnnnnnnnnnnnnnnnnnnnnnnnnnnnnnnnnnnnnnnnnnnnnnnnnnnnnnnnnnnnnnnnnnnnnnnnnnnnnnnnnnnnnnnnnnnnnnnnnnnnnnnnnnnnnnnnnnnnnnnnnnnnnnnnnnnnnnnnnnnnnnnnnnnnnnnnnnnnnnnnnnnnnnnnnnnnnnnnnnnnnnnnnnnnnnnnnnnnnnnnnnnnnnnnnnnnnnnnnnnnnnnnnnnnnnnnnnnnnnnnnnnnnnnnnnnnnnnnnnnnnnnnnnnnnnnnnnnnnnnnnnnnnnnnnnnnnnnnnnnnnnnnnnnnnnnnnnnnnnnnnnnnnnnnnnnnnnnnnnnnnnnnnnnnnnnnnnnnnnnnnnnnnnnnnnnnnnnnnnnnnnnnnnnnnnnnnnnnnnnnnnnnnnnnnnnnnnnnnnnnnnnnnnnnnnnnnnnnnnnnnnnnnnnnnnnnnnnnnnnnnnnnnnnnnnnnnnnnnnnnnnnnnnnnnnnnnnnnnnnnnnnnnnnnnnnnnnnnnnnnnnnnnnnnnnnnnnnnnnnnnnnnnnnnnnnnnnnnnnnnnnnnnnnnnnnnnnnnnnnnnnnnnnnnnnnnnnnnnnnnnnnnnnnnnnnnnnnnnnnnnnnnnnnnnnnnnnnnnnnnnnnnnnnnnnnnnnnnnnnnnnnnnnnnnnnnnnnnnnnnnnnnnnnnnnnnnnnnnnnnnnnnnnnnnnnnnnnnnnnnnnnnnnnnnnnnnnnnnnnnnnnnnnnnnnnnnnnnnnnnnnnnnnnnnnnnnnnnnnnnnnnnnnnnnnnnnnnnnnnnnnnnnnnnnnnnnnnnnnnnnnnnnnnnnnnnnnnnnnnnnnnnnnnnnnnnnnnnnnnnnnnnnnnnnnnnnnnnnnnnnnnnnnnnnnnnnnnnnnnnnnnnnnnnnnnnnnnnnnnnnnnnnnnnnnnnnnnnnnnnnnnnnnnnnnnnnnnnnnnnnnnnnnnnnnnnnnnnnnnnnnnnnnnnnnnnnnnnnnnnnnnnnnnnnnnnnnnnnnnnnnnnnnnnnnnnnnnnnnnnnnnnnnnnnnnnnnnnnnnnnnnnnnnnnnnnnnnnnnnnnnnnnnnnnnnnnnnnnnnnnnnnnnnnnnnnnnnnnnnnnnnnnnnnnnnnnnnnnnnnnnnnnnnnnnnnnnnnnnnnnnnnnnnnnnnnnnnnnnnnnnnnnnnnnnnnnnnnnnnnnnnnnnnnnnnnnnnnnnnnnnnnnnnnnnnnnnnnnnnnnnnnnnnnnnnnnnnnnnnnnnnnnnnnnnnnnnnnnnnnnnnnnnnnnnnnnnnnnnnnnnnnnnnnnnnnnnnnnnnnnnnnnnnnnnnnnnnnnnnnnnnnnnnnnnnnnnnnnnnnnnnnnnnnnnnnnnnnnnnnnnnnnnnnnnnnnnnnnnnnnnnnnnnnnnnnnnnnnnnnnnnnnnnnnnnnnnnnnnnnnnnnnnnnnnnnnnnnnnnnnnnnnnnnnnnnnnnnnnnnnnnnnnnnnnnnnnnnnnnnnnnnnnnnnnnnnnnnnnnnnnnnnnnnnnnnnnnnnnnnnnnnnnnnnnnnnnnnnnnnnnnnnnnnnnnnnnnnnnnnnnnnnnnnnnnnnnnnnnnnnnnnnnnnnnnnnnnnnnnnnnnnnnnnnnnnnnnnnnnnnnnnnnnnnnnnnnnnnnnnnnnnnnnnnnnnnnnnnnnnnnnnnnnnnnnnnnnnnnnnnnnnnnnnnnnnnnnnnnnnnnnnnnnnnnnnnnnnnnnnnnnnnnnnnnnnnnnnnnnnnnnnnnnnnnnnnnnnnnnnnnnnnnnnnnnnnnnnnnnnnnnnnnnnnnnnnnnnnnnnnnnnnnnnnnnnnnnnnnnnnnnnnnnnnnnnnnnnnnnnnnnnnnnnnnnnnnnnnnnnnnnnnnnnnnnnnnnnnnnnnnnnnnnnnnnnnnnnnnnnnnnnnnnnnnnnnnnnnnnnnnnnnnnnnnnnnnnnnnnnnnnnnnnnnnnnnnnnnnnnnnnnnnnnnnnnnnnnnnnnnnnnnnnnnnnnnnnnnnnnnnnnnnnnnnnnnnnnnnnnnnnnnnnnnnnnnnnnnnnnnnnnnnnnnnnnnnnnnnnnnnnnnnnnnnnnnnnnnnnnnnnnnnnnnnnnnnnnnnnnnnnnnnnnnnnnnnnnnnnnnnnnnnnnnnnnnnnnnnnnnnnnnnnnnnnnnnnnnnnnnnnnnnnnnnnnnnnnnnnnnnnnnnnnnnnnnnnnnnnnnnnnnnnnnnnnnnnnnnnnnnnnnnnnnnnnnnnnnnnnnnnnnnnnnnnnnnnnnnnnnnnnnnnnnnnnnnnnnnnnnnnnnnnnnnnnnnnnnnnnnnnnnnnnnnnnnnnnnnnnnnnnnnnnnnnnnnnnnnnnnnnnnnnnnnnnnnnnnnnnnnnnnnnnnnnnnnnnnnnnnnnnnnnnnnnnnnnnnnnnnnnnnnnnnnnnnnnnnnnnnnnnnnnnnnnnnnnnnnnnnnnnnnnnnnnnnnnnnnnnnnnnnnnnnnnnnnnnnnnnnnnnnnnnnnnnnnnnnnnnnnnnnnnnnnnnnnnnnnnnnnnnnnnnnnnnnnnnnnnnnnnnnnnnnnnnnnnnnnnnnnnnnnnnnnnnnnnnnnnnnnnnnnnnnnnnnnnnnnnnnnnnnnnnnnnnnnnnnnnnnnnnnnnnnnnnnnnnnnnnnnnnnnnnnnnnnnnnnnnnnnnnnnnnnnnnnnnnnnnnnnnnnnnnnnnnnnnnnnnnnnnnnnnnnnnnnnnnnnnnnnnnnnnnnnnnnnnnnnnnnnnnnnnnnnnnnnnnnnnnnnnnnnnnnnnnnnnnnnnnnnnnnnnnnnnnnnnnnnnnnnnnnnnnnnnnnnnnnnnnnnnnnnnnnnnnnnnnnnnnnnnnnnnnnnnnnnnnnnnnnnnnnnnnnnnnnnnnnnnnnnnnnnnnnnnnnnnnnnnnnnnnnnnnnnnnnnnnnnnnnnnnnnnnnnnnnnnnnnnnnnnnnnnnnnnnnnnnnnnnnnnnnnnnnnnnnnnnnnnnnnnnnnnnnnnnnnnnnnnnnnnnnnnnnnnnnnnnnnnnnnnnnnnnnnnnnnnnnnnnnnnnnnnnnnnnnnnnnnnnnnnnnnnnnnnnnnnnnnnnnnnnnnnnnnnnnnnnnnnnnnnnnnnnnnnnnnnnnnnnnnnnnnnnnnnnnnnnnnnnnnnnnnnnnnnnnnnnnnnnnnnnnnnnnnnnnnnnnnnnnnnnnnnnnnnnnnnnnnnnnnnnnnnnnnnnnnnnnnnnnnnnnnnnnnnnnnnnnnnnnnnnnnnnnnnnnnnnnnnnnnnnnnnnnnnnnnnnnnnnnnnnnnnnnnnnnnnnnnnnnnnnnnnnnnnnnnnnnnnnnnnnnnnnnnnnnnnnnnnnnnnnnnnnnnnnnnnnnnnnnnnnnnnnnnnnnnnnnnnnnnnnnnnnnnnnnnnnnnnnnnnnnnnnnnnnnnnnnnnnnnnnnnnnnnnnnnnnnnnnnnnnnnnnnnnnnnnnnnnnnnnnnnnnnnnnnnnnnnnnnnnnnnnnnnnnnnnnnnnnnnnnnnnnnnnnnnnnnnnnnnnnnnnnnnnnnnnnnnnnnnnnnnnnnnnnnnnnnnnnnnnnnnnnnnnnnnnnnnnnnnnnnnnnnnnnnnnnnnnnnnnnnnnnnnnnnnnnnnnnnnnnnnnnnnnnnnnnnnnnnnnnnnnnnnnnnnnnnnnnnnnnnnnnnnnnnnnnnnnnnnnnnnnnnnnnnnnnnnnnnnnnnnnnnnnnnnnnnnnnnnnnnnnnnnnnnnnnnnnnnnnnnnnnnnnnnnnnnnnnnnnnnnnnnnnnnnnnnnnnnnnnnnnnnnnnnnnnnnnnnnnnnnnnnnnnnnnnnnnnnnnnnnnnnnnnnnnnnnnnnnnnnnnnnnnnnnnnnnnnnnnnnnnnnnnnnnnnnnnnnnnnnnnnnnnnnnnnnnnnnnnnnnnnnnnnnnnnnnnnnnnnnnnnnnnnnnnnnnnnnnnnnnnnnnnnnnnnnnnnnnnnnnnnnnnnnnnnnnnnnnnnnnnnnnnnnnnnnnnnnnnnnnnnnnnnnnnnnnnnnnnnnnnnnnnnnnnnnnnnnnnnnnnnnnnnnnnnnnnnnnnnnnnnnnnnnnnnnnnnnnnnnnnnnnnnnnnnnnnnnnnnnnnnnnnnnnnnnnnnnnnnnnnnnnnnnnnnnnnnnnnnnnnnnnnnnnnnnnnnnnnnnnnnnnnnnnnnnnnnnnnnnnnnnnnnnnnnnnnnnnnnnnnnnnnnnnnnnnnnnnnnnnnnnnnnnnnnnnnnnnnnnnnnnnnnnnnnnnnnnnnnnnnnnnnnnnnnnnnnnnnnnnnnnnnnnnnnnnnnnnnnnnnnnnnnnnnnnnnnnnnnnnnnnnnnnnnnnnnnnnnnnnnnnnnnnnnnnnnnnnnnnnnnnnnnnnnnnnnnnnnnnnnnnnnnnnnnnnnnnnnnnnnnnnnnnnnnnnnnnnnnnnnnnnnnnnnnnnnnnnnnnnnnnnnnnnnnnnnnnnnnnnnnnnnnnnnnnnnnnnnnnnnnnnnnnnnnnnnnnnnnnnnnnnnnnnnnnnnnnnnnnnnnnnnnnnnnnnnnnnnnnnnnnnnnnnnnnnnnnnnnnnnnnnnnnnnnnnnnnnnnnnnnnnnnnnnnnnnnnnnnnnnnnnnnnnnnnnnnnnnnnnnnnnnnnnnnnnnnnnnnnnnnnnnnnnnnnnnnnnnnnnnnnnnnnnnnnnnnnnnnnnnnnnnnnnnnnnnnnnnnnnnnnnnnnnnnnnnnnnnnnnnnnnnnnnnnnnnnnnnnnnnnnnnnnnnnnnnnnnnnnnnnnnnnnnnnnnnnnnnnnnnnnnnnnnnnnnnnnnnnnnnnnnnnnnnnnnnnnnnnnnnnnnnnnnnnnnnnnnnnnnnnnnnnnnnnnnnnnnnnnnnnnnnnnnnnnnnnnnnnnnnnnnnnnnnnnnnnnnnnnnnnnnnnnnnnnnnnnnnnnnnnnnnnnnnnnnnnnnnnnnnnnnnnnnnnnnnnnnnnnnnnnnnnnnnnnnnnnnnnnnnnnnnnnnnnnnnnnnnnnnnnnnnnnnnnnnnnnnnnnnnnnnnnnnnnnnnnnnnnnnnnnnnnnnnnnnnnnnnnnnnnnnnnnnnnnnnnnnnnnnnnnnnnnnnnnnnnnnnnnnnnnnnnnnnnnnnnnnnnnnnnnnnnnnnnnnnnnnnnnnnnnnnnnnnnnnnnnnnnnnnnnnnnnnnnnnnnnnnnnnnnnnnnnnnnnnnnnnnnnnnnnnnnnnnnnnnnnnnnnnnnnnnnnnnnnnnnnnnnnnnnnnnnnnnnnnnnnnnnnnnnnnnnnnnnnnnnnnnnnnnnnnnnnnnnnnnnnnnnnnnnnnnnnnnnnnnnnnnnnnnnnnnnnnnnnnnnnnnnnnnnnnnnnnnnnnnnnnnnnnnnnnnnnnnnnnnnnnnnnnnnnnnnnnnnnnnnnnnnnnnnnnnnnnnnnnnnnnnnnnnnnnnnnnnnnnnnnnnnnnnnnnnnnnnnnnnnnnnnnnnnnnnnnnnnnnnnnnnnnnnnnnnnnnnnnnnnnnnnnnnnnnnnnnnnnnnnnnnnnnnnnnnnnnnnnnnnnnnnnnnnnnnnnnnnnnnnnnnnnnnnnnnnnnnnnnnnnnnnnnnnnnnnnnnnnnnnnnnnnnnnnnnnnnnnnnnnnnnnnnnnnnnnnnnnnnnnnnnnnnnnnnnnnnnnnnnnnnnnnnnnnnnnnnnnnnnnnnnnnnnnnnnnnnnnnnnnnnnnnnnnnnnnnnnnnnnnnnnnnnnnnnnnnnnnnnnnnnnnnnnnnnnnnnnnnnnnnnnnnnnnnnnnnnnnnnnnnnnnnnnnnnnnnnnnnnnnnnnnnnnnnnnnnnnnnnnnnnnnnnnnnnnnnnnnnnnnnnnnnnnnnnnnnnnnnnnnnnnnnnnnnnnnnnnnnnnnnnnnnnnnnnnnnnnnnnnnnnnnnnnnnnnnnnnnnnnnnnnnnnnnnnnnnnnnnnnnnnnnnnnnnnnnnnnnnnnnnnnnnnnnnnnnnnnnnnnnnnnnnnnnnnnnnnnnnnnnnnnnnnnnnnnnnnnnnnnnnnnnnnnnnnnnnnnnnnnnnnnnnnnnnnnnnnnnnnnnnnnnnnnnnnnnnnnnnnnnnnnnnnnnnnnnnnnnnnnnnnnnnnnnnnnnnnnnnnnnnnnnnnnnnnnnnnnnnnnnnnnnnnnnnnnnnnnnnnnnnnnnnnnnnnnnnnnnnnnnnnnnnnnnnnnnnnnnnnnnnnnnnnnnnnnnnnnnnnnnnnnnnnnnnnnnnnnnnnnnnnnnnnnnnnnnnnnnnnnnnnnnnnnnnnnnnnnnnnnnnnnnnnnnnnnnnnnnnnnnnnnnnnnnnnnnnnnnnnnnnnnnnnnnnnnnnnnnnnnnnnnnnnnnnnnnnnnnnnnnnnnnnnnnnnnnnnnnnnnnnnnnnnnnnnnnnnnnnnnnnnnnnnnnnnnnnnnnnnnnnnnnnnnnnnnnnnnnnnnnnnnnnnnnnnnnnnnnnnnnnnnnnnnnnnnnnnnnnnnnnnnnnnnnnnnnnnnnnnnnnnnnnnnnnnnnnnnnnnnnnnnnnnnnnnnnnnnnnnnnnnnnnnnnnnnnnnnnnnnnnnnnnnnnnnnnnnnnnnnnnnnnnnnnnnnnnnnnnnnnnnnnnnnnnnnnnnnnnnnnnnnnnnnnnnnnnnnnnnnnnnnnnnnnnnnnnnnnnnnnnnnnnnnnnnnnnnnnnnnnnnnnnnnnnnnnnnnnnnnnnnnnnnnnnnnnnnnnnnnnnnnnnnnnnnnnnnnnnnnnnnnnnnnnnnnnnnnnnnnnnnnnnnnnnnnnnnnnnnnnnnnnnnnnnnnnnnnnnnnnnnnnnnnnnnnnnnnnnnnnnnnnnnnnnnnnnnnnnnnnnnnnnnnnnnnnnnnnnnnnnnnnnnnnnnnnnnnnnnnnnnnnnnnnnnnnnnnnnnnnnnnnnnnnnnnnnnnnnnnnnnnnnnnnnnnnnnnnnnnnnnnnnnnnnnnnnnnnnnnnnnnnnnnnnnnnnnnnnnnnnnnnnnnnnnnnnnnnnnnnnnnnnnnnnnnnnnnnnnnnnnnnnnnnnnnnnnnnnnnnnnnnnnnnnnnnnnnnnnnnnnnnnnnnnnnnnnnnnnnnnnnnnnnnnnnnnnnnnnnnnnnnnnnnnnnnnnnnnnnnnnnnnnnnnnnnnnnnnnnnnnnnnnnnnnnnnnnnnnnnnnnnnnnnnnnnnnnnnnnnnnnnnnnnnnnnnnnnnnnnnnnnnnnnnnnnnnnnnnnnnnnnnnnnnnnnnnnnnnnnnnnnnnnnnnnnnnnnnnnnnnnnnnnnnnnnnnnnnnnnnnnnnnnnnnnnnnnnnnnnnnnnnnnnnnnnnnnnnnnnnnnnnnnnnnnnnnnnnnnnnnnnnnnnnnnnnnnnnnnnnnnnnnnnnnnnnnnnnnnnnnnnnnnnnnnnnnnnnnnnnnnnnnnnnnnnnnnnnnnnnnnnnnnnnnnnnnnnnnnnnnnnnnnnnnnnnnnnnnnnnnnnnnnnnnnnnnnnnnnnnnnnnnnnnnnnnnnnnnnnnnnnnnnnnnnnnnnnnnnnnnnnnnnnnnnnnnnnnnnnnnnnnnnnnnnnnnnnnnnnnnnnnnnnnnnnnnnnnnnnnnnnnnnnnnnnnnnnnnnnnnnnnnnnnnnnnnnnnnnnnnnnnnnnnnnnnnnnnnnnnnnnnnnnnnnnnnnnnnnnnnnnnnnnnnnnnnnnnnnnnnnnnnnnnnnnnnnnnnnnnnnnnnnnnnnnnnnnnnnnnnnnnnnnnnnnnnnnnnnnnnnnnnnnnnnnnnnnnnnnnnnnnnnnnnnnnnnnnnnnnnnnnnnnnnnnnnnnnnnnnnnnnnnnnnnnnnnnnnnnnnnnnnnnnnnnnnnnnnnnnnnnnnnnnnnnnnnnnnnnnnnnnnnnnnnnnnnnnnnnnnnnnnnnnnnnnnnnnnnnnnnnnnnnnnnnnnnnnnnnnnnnnnnnnnnnnnnnnnnnnnnnnnnnnnnnnnnnnnnnnnnnnnnnnnnnnnnnnnnnnnnnnnnnnnnnnnnnnnnnnnnnnnnnnnnnnnnnnnnnnnnnnnnnnnnnnnnnnnnnnnnnnnnnnnnnnnnnnnnnnnnnnnnnnnnnnnnnnnnnnnnnnnnnnnnnnnnnnnnnnnnnnnnnnnnnnnnnnnnnnnnnnnnnnnnnnnnnnnnnnnnnnnnnnnnnnnnnnnnnnnnnnnnnnnnnnnnnnnnnnnnnnnnnnnnnnnnnnnnnnnnnnnnnnnnnnnnnnnnnnnnnnnnnnnnnnnnnnnnnnnnnnnnnnnnnnnnnnnnnnnnnnnnnnnnnnnnnnnnnnnnnnnnnnnnnnnnnnnnnnnnnnnnnnnnnnnnnnnnnnnnnnnnnnnnnnnnnnnnnnnnnnnnnnnnnnnnnnnnnnnnnnnnnnnnnnnnnnnnnnnnnnnnnnnnnnnnnnnnnnnnnnnnnnnnnnnnnnnnnnnnnnnnnnnnnnnnnnnnnnnnnnnnnnnnnnnnnnnnnnnnnnnnnnnnnnnnnnnnnnnnnnnnnnnnnnnnnnnnnnnnnnnnnnnnnnnnnnnnnnnnnnnnnnnnnnnnnnnnnnnnnnnnnnnnnnnnnnnnnnnnnnnnnnnnnnnnnnnnnnnnnnnnnnnnnnnnnnnnnnnnnnnnnnnnnnnnnnnnnnnnnnnnnnnnnnnnnnnnnnnnnnnnnnnnnnnnnnnnnnnnnnnnnnnnnnnnnnnnnnnnnnnnnnnnnnnnnnnnnnnnnnnnnnnnnnnnnnnnnnnnnnnnnnnnnnnnnnnnnnnnnnnnnnnnnnnnnnnnnnnnnnnnnnnnnnnnnnnnnnnnnnnnnnnnnnnnnnnnnnnnnnnnnnnnnnnnnnnnnnnnnnnnnnnnnnnnnnnnnnnnnnnnnnnnnnnnnnnnnnnnnnnnnnnnnnnnnnnnnnnnnnnnnnnnnnnnnnnnnnnnnnnnnnnnnnnnnnnnnnnnnnnnnnnnnnnnnnnnnnnnnnnnnnnnnnnnnnnnnnnnnnnnnnnnnnnnnnnnnnnnnnnnnnnnnnnnnnnnnnnnnnnnnnnnnnnnnnnnnnnnnnnnnnnnnnnnnnnnnnnnnnnnnnnnnnnnnnnnnnnnnnnnnnnnnnnnnnnnnnnnnnnnnnnnnnnnnnnnnnnnnnnnnnnnnnnnnnnnnnnnnnnnnnnnnnnnnnnnnnnnnnnnnnnnnnnnnnnnnnnnnnnnnnnnnnnnnnnnnnnnnnnnnnnnnnnnnnnnnnnnnnnnnnnnnnnnnnnnnnnnnnnnnnnnnnnnnnnnnnnnnnnnnnnnnnnnnnnnnnnnnnnnnnnnnnnnnnnnnnnnnnnnnnnnnnnnnnnnnnnnnnnnnnnnnnnnnnnnnnnnnnnnnnnnnnnnnnnnnnnnnnnnnnnnnnnnnnnnnnnnnnnnnnnnnnnnnnnnnnnnnnnnnnnnnnnnnnnnnnnnnnnnnnnnnnnnnnnnnnnnnnnnnnnnnnnnnnnnnnnnnnnnnnnnnnnnnnnnnnnnnnnnnnnnnnnnnnnnnnnnnnnnnnnnnnnnnnnnnnnnnnnnnnnnnnnnnnnnnnnnnnnnnnnnnnnnnnnnnnnnnnnnnnnnnnnnnnnnnnnnnnnnnnnnnnnnnnnnnnnnnnnnnnnnnnnnnnnnnnnnnnnnnnnnnnnnnnnnnnnnnnnnnnnnnnnnnnnnnnnnnnnnnnnnnnnnnnnnnnnnnnnnnnnnnnnnnnnnnnnnnnnnnnnnnnnnnnnnnnnnnnnnnnnnnnnnnnnnnnnnnnnnnnnnnnnnnnnnnnnnnnnnnnnnnnnnnnnnnnnnnnnnnnnnnnnnnnnnnnnnnnnnnnnnnnnnnnnnnnnnnnnnnnnnnnnnnnnnnnnnnnnnnnnnnnnnnnnnnnnnnnnnnnnnnnnnnnnnnnnnnnnnnnnnnnnnnnnnnnnnnnnnnnnnnnnnnnnnnnnnnnnnnnnnnnnnnnnnnnnnnnnnnnnnnnnnnnnnnnnnnnnnnnnnnnnnnnnnnnnnnnnnnnnnnnnnnnnnnnnnnnnnnnnnnnnnnnnnnnnnnnnnnnnnnnnnnnnnnnnnnnnnnnnnnnnnnnnnnnnnnnnnnnnnnnnnnnnnnnnnnnnnnnnnnnnnnnnnnnnnnnnnnnnnnnnnnnnnnnnnnnnnnnnnnnnnnnnnnnnnnnnnnnnnnnnnnnnnnnnnnnnnnnnnnnnnnnnnnnnnnnnnnnnnnnnnnnnnnnnnnnnnnnnnnnnnnnnnnnnnnnnnnnnnnnnnnnnnnnnnnnnnnnnnnnnnnnnnnnnnnnnnnnnnnnnnnnnnnnnnnnnnnnnnnnnnnnnnnnnnnnnnnnnnnnnnnnnnnnnnnnnnnnnnnnnnnnnnnnnnnnnnnnnnnnnnnnnnnnnnnnnnnnnnnnnnnnnnnnnnnnnnnnnnnnnnnnnnnnnnnnnnnnnnnnnnnnnnnnnnnnnnnnnnnnnnnnnnnnnnnnnnnnnnnnnnnnnnnnnnnnnnnnnnnnnnnnnnnnnnnnnnnnnnnnnnnnnnnnnnnnnnnnnnnnnnnnnnnnnnnnnnnnnnnnnnnnnnnnnnnnnnnnnnnnnnnnnnnnnnnnnnnnnnnnnnnnnnnnnnnnnnnnnnnnnnnnnnnnnnnnnnnnnnnnnnnnnnnnnnnnnnnnnnnnnnnnnnnnnnnnnnnnnnnnnnnnnnnnnnnnnnnnnnnnnnnnnnnnnnnnnnnnnnnnnnnnnnnnnnnnnnnnnnnnnnnnnnnnnnnnnnnnnnnnnnnnnnnnnnnnnnnnnnnnnnnnnnnnnnnnnnnnnnnnnnnnnnnnnnnnnnnnnnnnnnnnnnnnnnnnnnnnnnnnnnnnnnnnnnnnnnnnnnnnnnnnnnnnnnnnnnnnnnnnnnnnnnnnnnnnnnnnnnnnnnnnnnnnnnnnnnnnnnnnnnnnnnnnnnnnnnnnnnnnnnnnnnnnnnnnnnnnnnnnnnnnnnnnnnnnnnnnnnnnnnnnnnnnnnnnnnnnnnnnnnnnnnnnnnnnnnnnnnnnnnnnnnnnnnnnnnnnnnnnnnnnnnnnnnnnnnnnnnnnnnnnnnnnnnnnnnnnnnnnnnnnnnnnnnnnnnnnnnnnnnnnnnnnnnnnnnnnnnnnnnnnnnnnnnnnnnnnnnnnnnnnnnnnnnnnnnnnnnnnnnnnnnnnnnnnnnnnnnnnnnnnnnnnnnnnnnnnnnnnnnnnnnnnnnnnnnnnnnnnnnnnnnnnnnnnnnnnnnnnnnnnnnnnnnnnnnnnnnnnnnnnnnnnnnnnnnnnnnnnnnnnnnnnnnnnnnnnnnnnnnnnnnnnnnnnnnnnnnnnnnnnnnnnnnnnnnnnnnnnnnnnnnnnnnnnnnnnnnnnnnnnnnnnnnnnnnnnnnnnnnnnnnnnnnnnnnnnnnnnnnnnnnnnnnnnnnnnnnnnnnnnnnnnnnnnnnnnnnnnnnnnnnnnnnnnnnnnnnnnnnnnnnnnnnnnnnnnnnnnnnnnnnnnnnnnnnnnnnnnnnnnnnnnnnnnnnnnnnnnnnnnnnnnnnnnnnnnnnnnnnnnnnnnnnnnnnnnnnnnnnnnnnnnnnnnnnnnnnnnnnnnnnnnnnnnnnnnnnnnnnnnnnnnnnnnnnnnnnnnnnnnnnnnnnnnnnnnnnnnnnnnnnnnnnnnnnnnnnnnnnnnnnnnnnnnnnnnnnnnnnnnnnnnnnnnnnnnnnnnnnnnnnnnnnnnnnnnnnnnnnnnnnnnnnnnnnnnnnnnnnnnnnnnnnnnnnnnnnnnnnnnnnnnnnnnnnnnnnnnnnnnnnnnnnnnnnnnnnnnnnnnnnnnnnnnnnnnnnnnnnnnnnnnnnnnnnnnnnnnnnnnnnnnnnnnnnnnnnnnnnnnnnnnnnnnnnnnnnnnnnnnnnnnnnnnnnnnnnnnnnnnnnnnnnnnnnnnnnnnnnnnnnnnnnnnnnnnnnnnnnnnnnnnnnnnnnnnnnnnnnnnnnnnnnnnnnnnnnnnnnnnnnnnnnnnnnnnnnnnnnnnnnnnnnnnnnnnnnnnnnnnnnnnnnnnnnnnnnnnnnnnnnnnnnnnnnnnnnnnnnnnnnnnnnnnnnnnnnnnnnnnnnnnnnnnnnnnnnnnnnnnnnnnnnnnnnnnnnnnnnnnnnnnnnnnnnnnnnnnnnnnnnnnnnnnnnnnnnnnnnnnnnnnnnnnnnnnnnnnnnnnnnnnnnnnnnnnnnnnnnnnnnnnnnnnnnnnnnnnnnnnnnnnnnnnnnnnnnnnnnnnnnnnnnnnnnnnnnnnnnnnnnnnnnnnnnnnnnnnnnnnnnnnnnnnnnnnnnnnnnnnnnnnnnnnnnnnnnnnnnnnnnnnnnnnnnnnnnnnnnnnnnnnnnnnnnnnnnnnnnnnnnnnnnnnnnnnnnnnnnnnnnnnnnnnnnnnnnnnnnnnnnnnnnnnnnnnnnnnnnnnnnnnnnnnnnnnnnnnnnnnnnnnnnnnnnnnnnnnnnnnnnnnnnnnnnnnnnnnnnnnnnnnnnnnnnnnnnnnnnnnnnnnnnnnnnnnnnnnnnnnnnnnnnnnnnnnnnnnnnnnnnnnnnnnnnnnnnnnnnnnnnnnnnnnnnnnnnnnnnnnnnnnnnnnnnnnnnnnnnnnnnnnnnnnnnnnnnnnnnnnnnnnnnnnnnnnnnnnnnnnnnnnnnnnnnnnnnnnnnnnnnnnnnnnnnnnnnnnnnnnnnnnnnnnnnnnnnnnnnnnnnnnnnnnnnnnnnnnnnnnnnnnnnnnnnnnnnnnnnnnnnnnnnnnnnnnnnnnnnnnnnnnnnnnnnnnnnnnnnnnnnnnnnnnnnnnnnnnnnnnnnnnnnnnnnnnnnnnnnnnnnnnnnnnnnnnnnnnnnnnnnnnnnnnnnnnnnnnnnnnnnnnnnnnnnnnnnnnnnnnnnnnnnnnnnnnnnnnnnnnnnnnnnnnnnnnnnnnnnnnnnnnnnnnnnnnnnnnnnnnnnnnnnnnnnnnnnnnnnnnnnnnnnnnnnnnnnnnnnnnnnnnnnnnnnnnnnnnnnnnnnnnnnnnnnnnnnnnnnnnnnnnnnnnnnnnnnnnnnnnnnnnnnnnnnnnnnnnnnnnnnnnnnnnnnnnnnnnnnnnnnnnnnnnnnnnnnnnnnnnnnnnnnnnnnnnnnnnnnnnnnnnnnnnnnnnnnnnnnnnnnnnnnnnnnnnnnnnnnnnnnnnnnnnnnnnnnnnnnnnnnnnnnnnnnnnnnnnnnnnnnnnnnnnnnnnnnnnnnnnnnnnnnnnnnnnnnnnnnnnnnnnnnnnnnnnnnnnnnnnnnnnnnnnnnnnnnnnnnnnnnnnnnnnnnnnnnnnnnnnnnnnnnnnnnnnnnnnnnnnnnnnnnnnnnnnnnnnnnnnnnnnnnnnnnnnnnnnnnnnnnnnnnnnnnnnnnnnnnnnnnnnnnnnnnnnnnnnnnnnnnnnnnnnnnnnnnnnnnnnnnnnnnnnnnnnnnnnnnnnnnnnnnnnnnnnnnnnnnnnnnnnnnnnnnnnnnnnnnnnnnnnnnnnnnnnnnnnnnnnnnnnnnnnnnnnnnnnnnnnnnnnnnnnnnnnnnnnnnnnnnnnnnnnnnnnnnnnnnnnnnnnnnnnnnnnnnnnnnnnnnnnnnnnnnnnnnnnnnnnnnnnnnnnnnnnnnnnnnnnnnnnnnnnnnnnnnnnnnnnnnnnnnnnnnnnnnnnnnnnnnnnnnnnnnnnnnnnnnnnnnnnnnnnnnnnnnnnnnnnnnnnnnnnnnnnnnnnnnnnnnnnnnnnnnnnnnnnnnnnnnnnnnnnnnnnnnnnnnnnnnnnnnnnnnnnnnnnnnnnnnnnnnnnnnnnnnnnnnnnnnnnnnnnnnnnnnnnnnnnnnnnnnnnnnnnnnnnnnnnnnnnnnnnnnnnnnnnnnnnnnnnnnnnnnnnnnnnnnnnnnnnnnnnnnnnnnnnnnnnnnnnnnnnnnnnnnnnnnnnnnnnnnnnnnnnnnnnnnnnnnnnnnnnnnnnnnnnnnnnnnnnnnnnnnnnnnnnnnnnnnnnnnnnnnnnnnnnnnnnnnnnnnnnnnnnnnnnnnnnnnnnnnnnnnnnnnnnnnnnnnnnnnnnnnnnnnnnnnnnnnnnnnnnnnnnnnnnnnnnnnnnnnnnnnnnnnnnnnnnnnnnnnnnnnnnnnnnnnnnnnnnnnnnnnnnnnnnnnnnnnnnnnnnnnnnnnnnnnnnnnnnnnnnnnnnnnnnnnnnnnnnnnnnnnnnnnnnnnnnnnnnnnnnnnnnnnnnnnnnnnnnnnnnnnnnnnnnnnnnnnnnnnnnnnnnnnnnnnnnnnnnnnnnnnnnnnnnnnnnnnnnnnnnnnnnnnnnnnnnnnnnnnnnnnnnnnnnnnnnnnnnnnnnnnnnnnnnnnnnnnnnnnnnnnnnnnnnnnnnnnnnnnnnnnnnnnnnnnnnnnnnnnnnnnnnnnnnnnnnnnnnnnnnnnnnnnnnnnnnnnnnnnnnnnnnnnnnnnnnnnnnnnnnnnnnnnnnnnnnnnnnnnnnnnnnnnnnnnnnnnnnnnnnnnnnnnnnnnnnnnnnnnnnnnnnnnnnnnnnnnnnnnnnnnnnnnnnnnnnnnnnnnnnnnnnnnnnnnnnnnnnnnnnnnnnnnnnnnnnnnnnnnnnnnnnnnnnnnnnnnnnnnnnnnnnnnnnnnnnnnnnnnnnnnnnnnnnnnnnnnnnnnnnnnnnnnnnnnnnnnnnnnnnnnnnnnnnnnnnnnnnnnnnnnnnnnnnnnnnnnnnnnnnnnnnnnnnnnnnnnnnnnnnnnnnnnnnnnnnnnnnnnnnnnnnnnnnnnnnnnnnnnnnnnnnnnnnnnnnnnnnnnnnnnnnnnnnnnnnnnnnnnnnnnnnnnnnnnnnnnnnnnnnnnnnnnnnnnnnnnnnnnnnnnnnnnnnnnnnnnnnnnnnnnnnnnnnnnnnnnnnnnnnnnnnnnnnnnnnnnnnnnnnnnnnnnnnnnnnnnnnnnnnnnnnnnnnnnnnnnnnnnnnnnnnnnnnnnnnnnnnnnnnnnnnnnnnnnnnnnnnnnnnnnnnnnnnnnnnnnnnnnnnnnnnnnnnnnnnnnnnnnnnnnnnnnnnnnnnnnnnnnnnnnnnnnnnnnnnnnnnnnnnnnnnnnnnnnnnnnnnnnnnnnnnnnnnnnnnnnnnnnnnnnnnnnnnnnnnnnnnnnnnnnnnnnnnnnnnnnnnnnnnnnnnnnnnnnnnnnnnnnnnnnnnnnnnnnnnnnnnnnnnnnnnnnnnnnnnnnnnnnnnnnnnnnnnnnnnnnnnnnnnnnnnnnnnnnnnnnnnnnnnnnnnnnnnnnnnnnnnnnnnnnnnnnnnnnnnnnnnnnnnnnnnnnnnnnnnnnnnnnnnnnnnnnnnnnnnnnnnnnnnnnnnnnnnnnnnnnnnnnnnnnnnnnnnnnnnnnnnnnnnnnnnnnnnnnnnnnnnnnnnnnnnnnnnnnnnnnnnnnnnnnnnnnnnnnnnnnnnnnnnnnnnnnnnnnnnnnnnnnnnnnnnnnnnnnnnnnnnnnnnnnnnnnnnnnnnnnnnnnnnnnnnnnnnnnnnnnnnnnnnnnnnnnnnnnnnnnnnnnnnnnnnnnnnnnnnnnnnnnnnnnnnnnnnnnnnnnnnnnnnnnnnnnnnnnnnnnnnnnnnnnnnnnnnnnnnnnnnnnnnnnnnnnnnnnnnnnnnnnnnnnnnnnnnnnnnnnnnnnnnnnnnnnnnnnnnnnnnnnnnnnnnnnnnnnnnnnnnnnnnnnnnnnnnnnnnnnnnnnnnnnnnnnnnnnnnnnnnnnnnnnnnnnnnnnnnnnnnnnnnnnnnnnnnnnnnnnnnnnnnnnnnnnnnnnnnnnnnnnnnnnnnnnnnnnnnnnnnnnnnnnnnnnnnnnnnnnnnnnnnnnnnnnnnnnnnnnnnnnnnnnnnnnnnnnnnnnnnnnnnnnnnnnnnnnnnnnnnnnnnnnnnnnnnnnnnnnnnnnnnnnnnnnnnnnnnnnnnnnnnnnnnnnnnnnnnnnnnnnnnnnnnnnnnnnnnnnnnnnnnnnnnnnnnnnnnnnnnnnnnnnnnnnnnnnnnnnnnnnnnnnnnnnnnnnnnnnnnnnnnnnnnnnnnnnnnnnnnnnnnnnnnnnnnnnnnnnnnnnnnnnnnnnnnnnnnnnnnnnnnnnnnnnnnnnnnnnnnnnnnnnnnnnnnnnnnnnnnnnnnnnnnnnnnnnnnnnnnnnnnnnnnnnnnnnnnnnnnnnnnnnnnnnnnnnnnnnnnnnnnnnnnnnnnnnnnnnnnnnnnnnnnnnnnnnnnnnnnnnnnnnnnnnnnnnnnnnnnnnnnnnnnnnnnnnnnnnnnnnnnnnnnnnnnnnnnnnnnnnnnnnnnnnnnnnnnnnnnnnnnnnnnnnnnnnnnnnnnnnnnnnnnnnnnnnnnnnnnnnnnnnnnnnnnnnnnnnnnnnnnnnnnnnnnnnnnnnnnnnnnnnnnnnnnnnnnnnnnnnnnnnnnnnnnnnnnnnnnnnnnnnnnnnnnnnnnnnnnnnnnnnnnnnnnnnnnnnnnnnnnnnnnnnnnnnnnnnnnnnnnnnnnnnnnnnnnnnnnnnnnnnnnnnnnnnnnnnnnnnnnnnnnnnnnnnnnnnnnnnnnnnnnnnnnnnnnnnnnnnnnnnnnnnnnnnnnnnnnnnnnnnnnnnnnnnnnnnnnnnnnnnnnnnnnnnnnnnnnnnnnnnnnnnnnnnnnnnnnnnnnnnnnnnnnnnnnnnnnnnnnnnnnnnnnnnnnnnnnnnnnnnnnnnnnnnnnnnnnnnnnnnnnnnnnnnnnnnnnnnnnnnnnnnnnnnnnnnnnnnnnnnnnnnnnnnnnnnnnnnnnnnnnnnnnnnnnnnnnnnnnnnnnnnnnnnnnnnnnnnnnnnnnnnnnnnnnnnnnnnnnnnnnnnnnnnnnnnnnnnnnnnnnnnnnnnnnnnnnnnnnnnnnnnnnnnnnnnnnnnnnnnnnnnnnnnnnnnnnnnnnnnnnnnnnnnnnnnnnnnnnnnnnnnnnnnnnnnnnnnnnnnnnnnnnnnnnnnnnnnnnnnnnnnnnnnnnnnnnnnnnnnnnnnnnnnnnnnnnnnnnnnnnnnnnnnnnnnnnnnnnnnnnnnnnnnnnnnnnnnnnnnnnnnnnnnnnnnnnnnnnnnnnnnnnnnnnnnnnnnnnnnnnnnnnnnnnnnnnnnnnnnnnnnnnnnnnnnnnnnnnnnnnnnnnnnnnnnnnnnnnnnnnnnnnnnnnnnnnnnnnnnnnnnnnnnnnnnnnnnnnnnnnnnnnnnnnnnnnnnnnnnnnnnnnnnnnnnnnnnnnnnnnnnnnnnnnnnnnnnnnnnnnnnnnnnnnnnnnnnnnnnnnnnnnnnnnnnnnnnnnnnnnnnnnnnnnnnnnnnnnnnnnnnnnnnnnnnnnnnnnnnnnnnnnnnnnnnnnnnnnnnnnnnnnnnnnnnnnnnnnnnnnnnnnnnnnnnnnnnnnnnnnnnnnnnnnnnnnnnnnnnnnnnnnnnnnnnnnnnnnnnnnnnnnnnnnnnnnnnnnnnnnnnnnnnnnnnnnnnnnnnnnnnnnnnnnnnnnnnnnnnnnnnnnnnnnnnnnnnnnnnnnnnnnnnnnnnnnnnnnnnnnnnnnnnnnnnnnnnnnnnnnnnnnnnnnnnnnnnnnnnnnnnnnnnnnnnnnnnnnnnnnnnnnnnnnnnnnnnnnnnnnnnnnnnnnnnnnnnnnnnnnnnnnnnnnnnnnnnnnnnnnnnnnnnnnnnnnnnnnnnnnnnnnnnnnnnnnnnnnnnnnnnnnnnnnnnnnnnnnnnnnnnnnnnnnnnnnnnnnnnnnnnnnnnnnnnnnnnnnnnnnnnnnnnnnnnnnnnnnnnnnnnnnnnnnnnnnnnnnnnnnnnnnnnnnnnnnnnnnnnnnnnnnnnnnnnnnnnnnnnnnnnnnnnnnnnnnnnnnnnnnnnnnnnnnnnnnnnnnnnnnnnnnnnnnnnnnnnnnnnnnnnnnnnnnnnnnnnnnnnnnnnnnnnnnnnnnnnnnnnnnnnnnnnnnnnnnnnnnnnnnnnnnnnnnnnnnnnnnnnnnnnnnnnnnnnnnnnnnnnnnnnnnnnnnnnnnnnnnnnnnnnnnnnnnnnnnnnnnnnnnnnnnnnnnnnnnnnnnnnnnnnnnnnnnnnnnnnnnnnnnnnnnnnnnnnnnnnnnnnnnnnnnnnnnnnnnnnnnnnnnnnnnnnnnnnnnnnnnnnnnnnnnnnnnnnnnnnnnnnnnnnnnnnnnnnnnnnnnnnnnnnnnnnnnnnnnnnnnnnnnnnnnnnnnnnnnnnnnnnnnnnnnnnnnnnnnnnnnnnnnnnnnnnnnnnnnnnnnnnnnnnnnnnnnnnnnnnnnnnnnnnnnnnnnnnnnnnnnnnnnnnnnnnnnnnnnnnnnnnnnnnnnnnnnnnnnnnnnnnnnnnnnnnnnnnnnnnnnnnnnnnnnnnnnnnnnnnnnnnnnnnnnnnnnnnnnnnnnnnnnnnnnnnnnnnnnnnnnnnnnnnnnnnnnnnnnnnnnnnnnnnnnnnnnnnnnnnnnnnnnnnnnnnnnnnnnnnnnnnnnnnnnnnnnnnnnnnnnnnnnnnnnnnnnnnnnnnnnnnnnnnnnnnnnnnnnnnnnnnnnnnnnnnnnnnnnnnnnnnnnnnnnnnnnnnnnnnnnnnnnnnnnnnnnnnnnnnnnnnnnnnnnnnnnnnnnnnnnnnnnnnnnnnnnnnnnnnnnnnnnnnnnnnnnnnnnnnnnnnnnnnnnnnnnnnnnnnnnnnnnnnnnnnnnnnnnnnnnnnnnnnnnnnnnnnnnnnnnnnnnnnnnnnnnnnnnnnnnnnnnnnnnnnnnnnnnnnnnnnnnnnnnnnnnnnnnnnnnnnnnnnnnnnnnnnnnnnnnnnnnnnnnnnnnnnnnnnnnnnnnnnnnnnnnnnnnnnnnnnnnnnnnnnnnnnnnnnnnnnnnnnnnnnnnnnnnnnnnnnnnnnnnnnnnnnnnnnnnnnnnnnnnnnnnnnnnnnnnnnnnnnnnnnnnnnnnnnnnnnnnnnnnnnnnnnnnnnnnnnnnnnnnnnnnnnnnnnnnnnnnnnnnnnnnnnnnnnnnnnnnnnnnnnnnnnnnnnnnnnnnnnnnnnnnnnnnnnnnnnnnnnnnnnnnnnnnnnnnnnnnnnnnnnnnnnnnnnnnnnnnnnnnnnnnnnnnnnnnnnnnnnnnnnnnnnnnnnnnnnnnnnnnnnnnnnnnnnnnnnnnnnnnnnnnnnnnnnnnnnnnnnnnnnnnnnnnnnnnnnnnnnnnnnnnnnnnnnnnnnnnnnnnnnnnnnnnnnnnnnnnnnnnnnnnnnnnnnnnnnnnnnnnnnnnnnnnnnnnnnnnnnnnnnnnnnnnnnnnnnnnnnnnnnnnnnnnnnnnnnnnnnnnnnnnnnnnnnnnnnnnnnnnnnnnnnnnnnnnnnnnnnnnnnnnnnnnnnnnnnnnnnnnnnnnnnnnnnnnnnnnnnnnnnnnnnnnnnnnnnnnnnnnnnnnnnnnnnnnnnnnnnnnnnnnnnnnnnnnnnnnnnnnnnnnnnnnnnnnnnnnnnnnnnnnnnnnnnnnnnnnnnnnnnnnnnnnnnnnnnnnnnnnnnnnnnnnnnnnnnnnnnnnnnnnnnnnnnnnnnnnnnnnnnnnnnnnnnnnnnnnnnnnnnnnnnnnnnnnnnnnnnnnnnnnnnnnnnnnnnnnnnnnnnnnnnnnnnnnnnnnnnnnnnnnnnnnnnnnnnnnnnnnnnnnnnnnnnnnnnnnnnnnnnnnnnnnnnnnnnnnnnnnnnnnnnnnnnnnnnnnnnnnnnnnnnnnnnnnnnnnnnnnnnnnnnnnnnnnnnnnnnnnnnnnnnnnnnnnnnnnnnnnnnnnnnnnnnnnnnnnnnnnnnnnnnnnnnnnnnnnnnnnnnnnnnnnnnnnnnnnnnnnnnnnnnnnnnnnnnnnnnnnnnnnnnnnnnnnnnnnnnnnnnnnnnnnnnnnnnnnnnnnnnnnnnnnnnnnnnnnnnnnnnnnnnnnnnnnnnnnnnnnnnnnnnnnnnnnnnnnnnnnnnnnnnnnnnnnnnnnnnnnnnnnnnnnnnnnnnnnnnnnnnnnnnnnnnnnnnnnnnnnnnnnnnnnnnnnnnnnnnnnnnnnnnnnnnnnnnnnnnnnnnnnnnnnnnnnnnnnnnnnnnnnnnnnnnnnnnnnnnnnnnnnnnnnnnnnnnnnnnnnnnnnnnnnnnnnnnnnnnnnnnnnnnnnnnnnnnnnnnnnnnnnnnnnnnnnnnnnnnnnnnnnnnnnnnnnnnnnnnnnnnnnnnnnnnnnnnnnnnnnnnnnnnnnnnnnnnnnnnnnnnnnnnnnnnnnnnnnnnnnnnnnnnnnnnnnnnnnnnnnnnnnnnnnnnnnnnnnnnnnnnnnnnnnnnnnnnnnnnnnnnnnnnnnnnnnnnnnnnnnnnnnnnnnnnnnnnnnnnnnnnnnnnnnnnnnnnnnnnnnnnnnnnnnnnnnnnnnnnnnnnnnnnnnnnnnnnnnnnnnnnnnnnnnnnnnnnnnnnnnnnnnnnnnnnnnnnnnnnnnnnnnnnnnnnnnnnnnnnnnnnnnnnnnnnnnnnnnnnnnnnnnnnnnnnnnnnnnnnnnnnnnnnnnnnnnnnnnnnnnnnnnnnnnnnnnnnnnnnnnnnnnnnnnnnnnnnnnnnnnnnnnnnnnnnnnnnnnnnnnnnnnnnnnnnnnnnnnnnnnnnnnnnnnnnnnnnnnnnnnnnnnnnnnnnnnnnnnnnnnnnnnnnnnnnnnnnnnnnnnnnnnnnnnnnnnnnnnnnnnnnnnnnnnnnnnnnnnnnnnnnnnnnnnnnnnnnnnnnnnnnnnnnnnnnnnnnnnnnnnnnnnnnnnnnnnnnnnnnnnnnnnnnnnnnnnnnnnnnnnnnnnnnnnnnnnnnnnnnnnnnnnnnnnnnnnnnnnnnnnnnnnnnnnnnnnnnnnnnnnnnnnnnnnnnnnnnnnnnnnnnnnnnnnnnnnnnnnnnnnnnnnnnnnnnnnnnnnnnnnnnnnnnnnnnnnnnnnnnnnnnnnnnnnnnnnnnnnnnnnnnnnnnnnnnnnnnnnnnnnnnnnnnnnnnnnnnnnnnnnnnnnnnnnnnnnnnnnnnnnnnnnnnnnnnnnnnnnnnnnnnnnnnnnnnnnnnnnnnnnnnnnnnnnnnnnnnnnnnnnnnnnnnnnnnnnnnnnnnnnnnnnnnnnnnnnnnnnnnnnnnnnnnnnnnnnnnnnnnnnnnnnnnnnnnnnnnnnnnnnnnnnnnnnnnnnnnnnnnnnnnnnnnnnnnnnnnnnnnnnnnnnnnnnnnnnnnnnnnnnnnnnnnnnnnnnnnnnnnnnnnnnnnnnnnnnnnnnnnnnnnnnnnnnnnnnnnnnnnnnnnnnnnnnnnnnnnnnnnnnnnnnnnnnnnnnnnnnnnnnnnnnnnnnnnnnnnnnnnnnnnnnnnnnnnnnnnnnnnnnnnnnnnnnnnnnnnnnnnnnnnnnnnnnnnnnnnnnnnnnnnnnnnnnnnnnnnnnnnnnnnnnnnnnnnnnnnnnnnnnnnnnnnnnnnnnnnnnnnnnnnnnnnnnnnnnnnnnnnnnnnnnnnnnnnnnnnnnnnnnnnnnnnnnnnnnnnnnnnnnnnnnnnnnnnnnnnnnnnnnnnnnnnnnnnnnnnnnnnnnnnnnnnnnnnnnnnnnnnnnnnnnnnnnnnnnnnnnnnnnnnnnnnnnnnnnnnnnnnnnnnnnnnnnnnnnnnnnnnnnnnnnnnnnnnnnnnnnnnnnnnnnnnnnnnnnnnnnnnnnnnnnnnnnnnnnnnnnnnnnnnnnnnnnnnnnnnnnnnnnnnnnnnnnnnnnnnnnnnnnnnnnnnnnnnnnnnnnnnnnnnnnnnnnnnnnnnnnnnnnnnnnnnnnnnnnnnnnnnnnnnnnnnnnnnnnnnnnnnnnnnnnnnnnnnnnnnnnnnnnnnnnnnnnnnnnnnnnnnnnnnnnnnnnnnnnnnnnnnnnnnnnnnnnnnnnnnnnnnnnnnnnnnnnnnnnnnnnnnnnnnnnnnnnnnnnnnnnnnnnnnnnnnnnnnnnnnnnnnnnnnnnnnnnnnnnnnnnnnnnnnnnnnnnnnnnnnnnnnnnnnnnnnnnnnnnnnnnnnnnnnnnnnnnnnnnnnnnnnnnnnnnnnnnnnnnnnnnnnnnnnnnnnnnnnnnnnnnnnnnnnnnnnnnnnnnnnnnnnnnnnnnnnnnnnnnnnnnnnnnnnnnnnnnnnnnnnnnnnnnnnnnnnnnnnnnnnnnnnnnnnnnnnnnnnnnnnnnnnnnnnnnnnnnnnnnnnnnnnnnnnnnnnnnnnnnnnnnnnnnnnnnnnnnnnnnnnnnnnnnnnnnnnnnnnnnnnnnnnnnnnnnnnnnnnnnnnnnnnnnnnnnnnnnnnnnnnnnnnnnnnnnnnnnnnnnnnnnnnnnnnnnnnnnnnnnnnnnnnnnnnnnnnnnnnnnnnnnnnnnnnnnnnnnnnnnnnnnnnnnnnnnnnnnnnnnnnnnnnnnnnnnnnnnnnnnnnnnnnnnnnnnnnnnnnnnnnnnnnnnnnnnnnnnnnnnnnnnnnnnnnnnnnnnnnnnnnnnnnnnnnnnnnnnnnnnnnnnnnnnnnnnnnnnnnnnnnnnnnnnnnnnnnnnnnnnnnnnnnnnnnnnnnnnnnnnnnnnnnnnnnnnnnnnnnnnnnnnnnnnnnnnnnnnnnnnnnnnnnnnnnnnnnnnnnnnnnnnnnnnnnnnnnnnnnnnnnnnnnnnnnnnnnnnnnnnnnnnnnnnnnnnnnnnnnnnnnnnnnnnnnnnnnnnnnnnnnnnnnnnnnnnnnnnnnnnnnnnnnnnnnnnnnnnnnnnnnnnnnnnnnnnnnnnnnnnnnnnnnnnnnnnnnnnnnnnnnnnnnnnnnnnnnnnnnnnnnnnnnnnnnnnnnnnnnnnnnnnnnnnnnnnnnnnnnnnnnnnnnnnnnnnnnnnnnnnnnnnnnnnnnnnnnnnnnnnnnnnnnnnnnnnnnnnnnnnnnnnnnnnnnnnnnnnnnnnnnnnnnnnnnnnnnnnnnnnnnnnnnnnnnnnnnnnnnnnnnnnnnnnnnnnnnnnnnnnnnnnnnnnnnnnnnnnnnnnnnnnnnnnnnnnnnnnnnnnnnnnnnnnnnnnnnnnnnnnnnnnnnnnnnnnnnnnnnnnnnnnnnnnnnnnnnnnnnnnnnnnnnnnnnnnnnnnnnnnnnnnnnnnnnnnnnnnnnnnnnnnnnnnnnnnnnnnnnnnnnnnnnnnnnnnnnnnnnnnnnnnnnnnnnnnnnnnnnnnnnnnnnnnnnnnnnnnnnnnnnnnnnnnnnnnnnnnnnnnnnnnnnnnnnnnnnnnnnnnnnnnnnnnnnnnnnnnnnnnnnnnnnnnnnnnnnnnnnnnnnnnnnnnnnnnnnnnnnnnnnnnnnnnnnnnnnnnnnnnnnnnnnnnnnnnnnnnnnnnnnnnnnnnnnnnnnnnnnnnnnnnnnnnnnnnnnnnnnnnnnnnnnnnnnnnnnnnnnnnnnnnnnnnnnnnnnnnnnnnnnnnnnnnnnnnnnnnnnnnnnnnnnnnnnnnnnnnnnnnnnnnnnnnnnnnnnnnnnnnnnnnnnnnnnnnnnnnnnnnnnnnnnnnnnnnnnnnnnnnnnnnnnnnnnnnnnnnnnnnnnnnnnnnnnnnnnnnnnnnnnnnnnnnnnnnnnnnnnnnnnnnnnnnnnnnnnnnnnnnnnnnnnnnnnnnnnnnnnnnnnnnnnnnnnnnnnnnnnnnnnnnnnnnnnnnnnnnnnnnnnnnnnnnnnnnnnnnnnnnnnnnnnnnnnnnnnnnnnnnnnnnnnnnnnnnnnnnnnnnnnnnnnnnnnnnnnnnnnnnnnnnnnnnnnnnnnnnnnnnnnnnnnnnnnnnnnnnnnnnnnnnnnnnnnnnnnnnnnnnnnnnnnnnnnnnnnnnnnnnnnnnnnnnnnnnnnnnnnnnnnnnnnnnnnnnnnnnnnnnnnnnnnnnnnnnnnnnnnnnnnnnnnnnnnnnnnnnnnnnnnnnnnnnnnnnnnnnnnnnnnnnnnnnnnnnnnnnnnnnnnnnnnnnnnnnnnnnnnnnnnnnnnnnnnnnnnnnnnnnnnnnnnnnnnnnnnnnnnnnnnnnnnnnnnnnnnnnnnnnnnnnnnnnnnnnnnnnnnnnnnnnnnnnnnnnnnnnnnnnnnnnnnnnnnnnnnnnnnnnnnnnnnnnnnnnnnnnnnnnnnnnnnnnnnnnnnnnnnnnnnnnnnnnnnnnnnnnnnnnnnnnnnnnnnnnnnnnnnnnnnnnnnnnnnnnnnnnnnnnnnnnnnnnnnnnnnnnnnnnnnnnnnnnnnnnnnnnnnnnnnnnnnnnnnnnnnnnnnnnnnnnnnnnnnnnnnnnnnnnnnnnnnnnnnnnnnnnnnnnnnnnnnnnnnnnnnnnnnnnnnnnnnnnnnnnnnnnnnnnnnnnnnnnnnnnnnnnnnnnnnnnnnnnnnnnnnnnnnnnnnnnnnnnnnnnnnnnnnnnnnnnnnnnnnnnnnnnnnnnnnnnnnnnnnnnnnnnnnnnnnnnnnnnnnnnnnnnnnnnnnnnnnnnnnnnnnnnnnnnnnnnnnnnnnnnnnnnnnnnnnnnnnnnnnnnnnnnnnnnnnnnnnnnnnnnnnnnnnnnnnnnnnnnnnnnnnnnnnnnnnnnnnnnnnnnnnnnnnnnnnnnnnnnnnnnnnnnnnnnnnnnnnnnnnnnnnnnnnnnnnnnnnnnnnnnnnnnnnnnnnnnnnnnnnnnnnnnnnnnnnnnnnnnnnnnnnnnnnnnnnnnnnnnnnnnnnnnnnnnnnnnnnnnnnnnnnnnnnnnnnnnnnnnnnnnnnnnnnnnnnnnnnnnnnnnnnnnnnnnnnnnnnnnnnnnnnnnnnnnnnnnnnnnnnnnnnnnnnnnnnnnnnnnnnnnnnnnnnnnnnnnnnnnnnnnnnnnnnnnnnnnnnnnnnnnnnnnnnnnnnnnnnnnnnnnnnnnnnnnnnnnnnnnnnnnnnnnnnnnnnnnnnnnnnnnnnnnnnnnnnnnnnnnnnnnnnnnnnnnnnnnnnnnnnnnnnnnnnnnnnnnnnnnnnnnnnnnnnnnnnnnnnnnnnnnnnnnnnnnnnnnnnnnnnnnnnnnnnnnnnnnnnnnnnnnnnnnnnnnnnnnnnnnnnnnnnnnnnnnnnnnnnnnnnnnnnnnnnnnnnnnnnnnnnnnnnnnnnnnnnnnnnnnnnnnnnnnnnnnnnnnnnnnnnnnnnnnnnnnnnnnnnnnnnnnnnnnnnnnnnnnnnnnnnnnnnnnnnnnnnnnnnnnnnnnnnnnnnnnnnnnnnnnnnnnnnnnnnnnnnnnnnnnnnnnnnnnnnnnnnnnnnnnnnnnnnnnnnnnnnnnnnnnnnnnnnnnnnnnnnnnnnnnnnnnnnnnnnnnnnnnnnnnnnnnnnnnnnnnnnnnnnnnnnnnnnnnnnnnnnnnnnnnnnnnnnnnnnnnnnnnnnnnnnnnnnnnnnnnnnnnnnnnnnnnnnnnnnnnnnnnnnnnnnnnnnnnnnnnnnnnnnnnnnnnnnnnnnnnnnnnnnnnnnnnnnnnnnnnnnnnnnnnnnnnnnnnnnnnnnnnnnnnnnnnnnnnnnnnnnnnnnnnnnnnnnnnnnnnnnnnnnnnnnnnnnnnnnnnnnnnnnnnnnnnnnnnnnnnnnnnnnnnnnnnnnnnnnnnnnnnnnnnnnnnnnnnnnnnnnnnnnnnnnnnnnnnnnnnnnnnnnnnnnnnnnnnnnnnnnnnnnnnnnnnnnnnnnnnnnnnnnnnnnnnnnnnnnnnnnnnnnnnnnnnnnnnnnnnnnnnnnnnnnnnnnnnnnnnnnnnnnnnnnnnnnnnnnnnnnnnnnnnnnnnnnnnnnnnnnnnnnnnnnnnnnnnnnnnnnnnnnnnnnnnnnnnnnnnnnnnnnnnnnnnnnnnnnnnnnnnnnnnnnnnnnnnnnnnnnnnnnnnnnnnnnnnnnnnnnnnnnnnnnnnnnnnnnnnnnnnnnnnnnnnnnnnnnnnnnnnnnnnnnnnnnnnnnnnnnnnnnnnnnnnnnnnnnnnnnnnnnnnnnnnnnnnnnnnnnnnnnnnnnnnnnnnnnnnnnnnnnnnnnnnnnnnnnnnnnnnnnnnnnnnnnnnnnnnnnnnnnnnnnnnnnnnnnnnnnnnnnnnnnnnnnnnnnnnnnnnnnnnnnnnnnnnnnnnnnnnnnnnnnnnnnnnnnnnnnnnnnnnnnnnnnnnnnnnnnnnnnnnnnnnnnnnnnnnnnnnnnnnnnnnnnnnnnnnnnnnnnnnnnnnnnnnnnnnnnnnnnnnnnnnnnnnnnnnnnnnnnnnnnnnnnnnnnnnnnnnnnnnnnnnnnnnnnnnnnnnnnnnnnnnnnnnnnnnnnnnnnnnnnnnnnnnnnnnnnnnnnnnnnnnnnnnnnnnnnnnnnnnnnnnnnnnnnnnnnnnnnnnnnnnnnnnnnnnnnnnnnnnnnnnnnnnnnnnnnnnnnnnnnnnnnnnnnnnnnnnnnnnnnnnnnnnnnnnnnnnnnnnnnnnnnnnnnnnnnnnnnnnnnnnnnnnnnnnnnnnnnnnnnnnnnnnnnnnnnnnnnnnnnnnnnnnnnnnnnnnnnnnnnnnnnnnnnnnnnnnnnnnnnnnnnnnnnnnnnnnnnnnnnnnnnnnnnnnnnnnnnnnnnnnnnnnnnnnnnnnnnnnnnnnnnnnnnnnnnnnnnnnnnnnnnnnnnnnnnnnnnnnnnnnnnnnnnnnnnnnnnnnnnnnnnnnnnnnnnnnnnnnnnnnnnnnnnnnnnnnnnnnnnnnnnnnnnnnnnnnnnnnnnnnnnnnnnnnnnnnnnnnnnnnnnnnnnnnnnnnnnnnnnnnnnnnnnnnnnnnnnnnnnnnnnnnnnnnnnnnnnnnnnnnnnnnnnnnnnnnnnnnnnnnnnnnnnnnnnnnnnnnnnnnnnnnnnnnnnnnnnnnnnnnnnnnnnnnnnnnnnnnnnnnnnnnnnnnnnnnnnnnnnnnnnnnnnnnnnnnnnnnnnnnnnnnnnnnnnnnnnnnnnnnnnnnnnnnnnnnnnnnnnnnnnnnnnnnnnnnnnnnnnnnnnnnnnnnnnnnnnnnnnnnnnnnnnnnnnnnnnnnnnnnnnnnnnnnnnnnnnnnnnnnnnnnnnnnnnnnnnnnnnnnnnnnnnnnnnnnnnnnnnnnnnnnnnnnnnnnnnnnnnnnnnnnnnnnnnnnnnnnnnnnnnnnnnnnnnnnnnnnnnnnnnnnnnnnnnnnnnnnnnnnnnnnnnnnnnnnnnnnnnnnnnnnnnnnnnnnnnnnnnnnnnnnnnnnnnnnnnnnnnnnnnnnnnnnnnnnnnnnnnnnnnnnnnnnnnnnnnnnnnnnnnnnnnnnnnnnnnnnnnnnnnnnnnnnnnnnnnnnnnnnnnnnnnnnnnnnnnnnnnnnnnnnnnnnnnnnnnnnnnnnnnnnnnnnnnnnnnnnnnnnnnnnnnnnnnnnnnnnnnnnnnnnnnnnnnnnnnnnnnnnnnnnnnnnnnnnnnnnnnnnnnnnnnnnnnnnnnnnnnnnnnnnnnnnnnnnnnnnnnnnnnnnnnnnnnnnnnnnnnnnnnnnnnnnnnnnnnnnnnnnnnnnnnnnnnnnnnnnnnnnnnnnnnnnnnnnnnnnnnnnnnnnnnnnnnnnnnnnnnnnnnnnnnnnnnnnnnnnnnnnnnnnnnnnnnnnnnnnnnnnnnnnnnnnnnnnnnnnnnnnnnnnnnnnnnnnnnnnnnnnnnnnnnnnnnnnnnnnnnnnnnnnnnnnnnnnnnnnnnnnnnnnnnnnnnnnnnnnnnnnnnnnnnnnnnnnnnnnnnnnnnnnnnnnnnnnnnnnnnnnnnnnnnnnnnnnnnnnnnnnnnnnnnnnnnnnnnnnnnnnnnnnnnnnnnnnnnnnnnnnnnnnnnnnnnnnnnnnnnnnnnnnnnnnnnnnnnnnnnnnnnnnnnnnnnnnnnnnnnnnnnnnnnnnnnnnnnnnnnnnnnnnnnnnnnnnnnnnnnnnnnnnnnnnnnnnnnnnnnnnnnnnnnnnnnnnnnnnnnnnnnnnnnnnnnnnnnnnnnnnnnnnnnnnnnnnnnnnnnnnnnnnnnnnnnnnnnnnnnnnnnnnnnnnnnnnnnnnnnnnnnnnnnnnnnnnnnnnnnnnnnnnnnnnnnnnnnnnnnnnnnnnnnnnnnnnnnnnnnnnnnnnnnnnnnnnnnnnnnnnnnnnnnnnnnnnnnnnnnnnnnnnnnnnnnnnnnnnnnnnnnnnnnnnnnnnnnnnnnnnnnnnnnnnnnnnnnnnnnnnnnnnnnnnnnnnnnnnnnnnnnnnnnnnnnnnnnnnnnnnnnnnnnnnnnnnnnnnnnnnnnnnnnnnnnnnnnnnnnnnnnnnnnnnnnnnnnnnnnnnnnnnnnnnnnnnnnnnnnnnnnnnnnnnnnnnnnnnnnnnnnnnnnnnnnnnnnnnnnnnnnnnnnnnnnnnnnnnnnnnnnnnnnnnnnnnnnnnnnnnnnnnnnnnnnnnnnnnnnnnnnnnnnnnnnnnnnnnnnnnnnnnnnnnnnnnnnnnnnnnnnnnnnnnnnnnnnnnnnnnnnnnnnnnnnnnnnnnnnnnnnnnnnnnnnnnnnnnnnnnnnnnnnnnnnnnnnnnnnnnnnnnnnnnnnnnnnnnnnnnnnnnnnnnnnnnnnnnnnnnnnnnnnnnnnnnnnnnnnnnnnnnnnnnnnnnnnnnnnnnnnnnnnnnnnnnnnnnnnnnnnnnnnnnnnnnnnnnnnnnnnnnnnnnnnnnnnnnnnnnnnnnnnnnnnnnnnnnnnnnnnnnnnnnnnnnnnnnnnnnnnnnnnnnnnnnnnnnnnnnnnnnnnnnnnnnnnnnnnnnnnnnnnnnnnnnnnnnnnnnnnnnnnnnnnnnnnnnnnnnnnnnnnnnnnnnnnnnnnnnnnnnnnnnnnnnnnnnnnnnnnnnnnnnnnnnnnnnnnnnnnnnnnnnnnnnnnnnnnnnnnnnnnnnnnnnnnnnnnnnnnnnnnnnnnnnnnnnnnnnnnnnnnnnnnnnnnnnnnnnnnnnnnnnnnnnnnnnnnnnnnnnnnnnnnnnnnnnnnnnnnnnnnnnnnnnnnnnnnnnnnnnnnnnnnnnnnnnnnnnnnnnnnnnnnnnnnnnnnnnnnnnnnnnnnnnnnnnnnnnnnnnnnnnnnnnnnnnnnnnnnnnnnnnnnnnnnnnnnnnnnnnnnnnnnnnnnnnnnnnnnnnnnnnnnnnnnnnnnnnnnnnnnnnnnnnnnnnnnnnnnnnnnnnnnnnnnnnnnnnnnnnnnnnnnnnnnnnnnnnnnnnnnnnnnnnnnnnnnnnnnnnnnnnnnnnnnnnnnnnnnnnnnnnnnnnnnnnnnnnnnnnnnnnnnnnnnnnnnnnnnnnnnnnnnnnnnnnnnnnnnnnnnnnnnnnnnnnnnnnnnnnnnnnnnnnnnnnnnnnnnnnnnnnnnnnnnnnnnnnnnnnnnnnnnnnnnnnnnnnnnnnnnnnnnnnnnnnnnnnnnnnnnnnnnnnnnnnnnnnnnnnnnnnnnnnnnnnnnnnnnnnnnnnnnnnnnnnnnnnnnnnnnnnnnnnnnnnnnnnnnnnnnnnnnnnnnnnnnnnnnnnnnnnnnnnnnnnnnnnnnnnnnnnnnnnnnnnnnnnnnnnnnnnnnnnnnnnnnnnnnnnnnnnnnnnnnnnnnnnnnnnnnnnnnnnnnnnnnnnnnnnnnnnnnnnnnnnnnnnnnnnnnnnnnnnnnnnnnnnnnnnnnnnnnnnnnnnnnnnnnnnnnnnnnnnnnnnnnnnnnnnnnnnnnnnnnnnnnnnnnnnnnnnnnnnnnnnnnnnnnnnnnnnnnnnnnnnnnnnnnnnnnnnnnnnnnnnnnnnnnnnnnnnnnnnnnnnnnnnnnnnnnnnnnnnnnnnnnnnnnnnnnnnnnnnnnnnnnnnnnnnnnnnnnnnnnnnnnnnnnnnnnnnnnnnnnnnnnnnnnnnnnnnnnnnnnnnnnnnnnnnnnnnnnnnnnnnnnnnnnnnnnnnnnnnnnnnnnnnnnnnnnnnnnnnnnnnnnnnnnnnnnnnnnnnnnnnnnnnnnnnnnnnnnnnnnnnnnnnnnnnnnnnnnnnnnnnnnnnnnnnnnnnnnnnnnnnnnnnnnnnnnnnnnnnnnnnnnnnnnnnnnnnnnnnnnnnnnnnnnnnnnnnnnnnnnnnnnnnnnnnnnnnnnnnnnnnnnnnnnnnnnnnnnnnnnnnnnnnnnnnnnnnnnnnnnnnnnnnnnnnnnnnnnnnnnnnnnnnnnnnnnnnnnnnnnnnnnnnnnnnnnnnnnnnnnnnnnnnnnnnnnnnnnnnnnnnnnnnnnnnnnnnnnnnnnnnnnnnnnnnnnnnnnnnnnnnnnnnnnnnnnnnnnnnnnnnnnnnnnnnnnnnnnnnnnnnnnnnnnnnnnnnnnnnnnnnnnnnnnnnnnnnnnnnnnnnnnnnnnnnnnnnnnnnnnnnnnnnnnnnnnnnnnnnnnnnnnnnnnnnnnnnnnnnnnnnnnnnnnnnnnnnnnnnnnnnnnnnnnnnnnnnnnnnnnnnnnnnnnnnnnnnnnnnnnnnnnnnnnnnnnnnnnnnnnnnnnnnnnnnnnnnnnnnnnnnnnnnnnnnnnnnnnnnnnnnnnnnnnnnnnnnnnnnnnnnnnnnnnnnnnnnnnnnnnnnnnnnnnnnnnnnnnnnnnnnnnnnnnnnnnnnnnnnnnnnnnnnnnnnnnnnnnnnnnnnnnnnnnnnnnnnnnnnnnnnnnnnnnnnnnnnnnnnnnnnnnnnnnnnnnnnnnnnnnnnnnnnnnnnnnnnnnnnnnnnnnnnnnnnnnnnnnnnnnnnnnnnnnnnnnnnnnnnnnnnnnnnnnnnnnnnnnnnnnnnnnnnnnnnnnnnnnnnnnnnnnnnnnnnnnnnnnnnnnnnnnnnnnnnnnnnnnnnnnnnnnnnnnnnnnnnnnnnnnnnnnnnnnnnnnnnnnnnnnnnnnnnnnnnnnnnnnnnnnnnnnnnnnnnnnnnnnnnnnnnnnnnnnnnnnnnnnnnnnnnnnnnnnnnnnnnnnnnnnnnnnnnnnnnnnnnnnnnnnnnnnnnnnnnnnnnnnnnnnnnnnnnnnnnnnnnnnnnnnnnnnnnnnnnnnnnnnnnnnnnnnnnnnnnnnnnnnnnnnnnnnnnnnnnnnnnnnnnnnnnnnnnnnnnnnnnnnnnnnnnnnnnnnnnnnnnnnnnnnnnnnnnnnnnnnnnnnnnnnnnnnnnnnnnnnnnnnnnnnnnnnnnnnnnnnnnnnnnnnnnnnnnnnnnnnnnnnnnnnnnnnnnnnnnnnnnnnnnnnnnnnnnnnnnnnnnnnnnnnnnnnnnnnnnnnnnnnnnnnnnnnnnnnnnnnnnnnnnnnnnnnnnnnnnnnnnnnnnnnnnnnnnnnnnnnnnnnnnnnnnnnnnnnnnnnnnnnnnnnnnnnnnnnnnnnnnnnnnnnnnnnnnnnnnnnnnnnnnnnnnnnnnnnnnnnnnnnnnnnnnnnnnnnnnnnnnnnnnnnnnnnnnnnnnnnnnnnnnnnnnnnnnnnnnnnnnnnnnnnnnnnnnnnnnnnnnnnnnnnnnnnnnnnnnnnnnnnnnnnnnnnnnnnnnnnnnnnnnnnnnnnnnnnnnnnnnnnnnnnnnnnnnnnnnnnnnnnnnnnnnnnnnnnnnnnnnnnnnnnnnnnnnnnnnnnnnnnnnnnnnnnnnnnnnnnnnnnnnnnnnnnnnnnnnnnnnnnnnnnnnnnnnnnnnnnnnnnnnnnnnnnnnnnnnnnnnnnnnnnnnnnnnnnnnnnnnnnnnnnnnnnnnnnnnnnnnnnnnnnnnnnnnnnnnnnnnnnnnnnnnnnnnnnnnnnnnnnnnnnnnnnnnnnnnnnnnnnnnnnnnnnnnnnnnnnnnnnnnnnnnnnnnnnnnnnnnnnnnnnnnnnnnnnnnnnnnnnnnnnnnnnnnnnnnnnnnnnnnnnnnnnnnnnnnnnnnnnnnnnnnnnnnnnnnnnnnnnnnnnnnnnnnnnnnnnnnnnnnnnnnnnnnnnnnnnnnnnnnnnnnnnnnnnnnnnnnnnnnnnnnnnnnnnnnnnnnnnnnnnnnnnnnnnnnnnnnnnnnnnnnnnnnnnnnnnnnnnnnnnnnnnnnnnnnnnnnnnnnnnnnnnnnnnnnnnnnnnnnnnnnnnnnnnnnnnnnnnnnnnnnnnnnnnnnnnnnnnnnnnnnnnnnnnnnnnnnnnnnnnnnnnnnnnnnnnnnnnnnnnnnnnnnnnnnnnnnnnnnnnnnnnnnnnnnnnnnnnnnnnnnnnnnnnnnnnnnnnnnnnnnnnnnnnnnnnnnnnnnnnnnnnnnnnnnnnnnnnnnnnnnnnnnnnnnnnnnnnnnnnnnnnnnnnnnnnnnnnnnnnnnnnnnnnnnnnnnnnnnnnnnnnnnnnnnnnnnnnnnnnnnnnnnnnnnnnnnnnnnnnnnnnnnnnnnnnnnnnnnnnnnnnnnnnnnnnnnnnnnnnnnnnnnnnnnnnnnnnnnnnnnnnnnnnnnnnnnnnnnnnnnnnnnnnnnnnnnnnnnnnnnnnnnnnnnnnnnnnnnnnnnnnnnnnnnnnnnnnnnnnnnnnnnnnnnnnnnnnnnnnnnnnnnnnnnnnnnnnnnnnnnnnnnnnnnnnnnnnnnnnnnnnnnnnnnnnnnnnnnnnnnnnnnnnnnnnnnnnnnnnnnnnnnnnnnnnnnnnnnnnnnnnnnnnnnnnnnnnnnnnnnnnnnnnnnnnnnnnnnnnnnnnnnnnnnnnnnnnnnnnnnnnnnnnnnnnnnnnnnnnnnnnnnnnnnnnnnnnnnnnnnnnnnnnnnnnnnnnnnnnnnnnnnnnnnnnnnnnnnnnnnnnnnnnnnnnnnnnnnnnnnnnnnnnnnnnnnnnnnnnnnnnnnnnnnnnnnnnnnnnnnnnnnnnnnnnnnnnnnnnnnnnnnnnnnnnnnnnnnnnnnnnnnnnnnnnnnnnnnnnnnnnnnnnnnnnnnnnnnnnnnnnnnnnnnnnnnnnnnnnnnnnnnnnnnnnnnnnnnnnnnnnnnnnnnnnnnnnnnnnnnnnnnnnnnnnnnnnnnnnnnnnnnnnnnnnnnnnnnnnnnnnnnnnnnnnnnnnnnnnnnnnnnnnnnnnnnnnnnnnnnnnnnnnnnnnnnnnnnnnnnnnnnnnnnnnnnnnnnnnnnnnnnnnnnnnnnnnnnnnnnnnnnnnnnnnnnnnnnnnnnnnnnnnnnnnnnnnnnnnnnnnnnnnnnnnnnnnnnnnnnnnnnnnnnnnnnnnnnnnnnnnnnnnnnnnnnnnnnnnnnnnnnnnnnnnnnnnnnnnnnnnnnnnnnnnnnnnnnnnnnnnnnnnnnnnnnnnnnnnnnnnnnnnnnnnnnnnnnnnnnnnnnnnnnnnnnnnnnnnnnnnnnnnnnnnnnnnnnnnnnnnnnnnnnnnnnnnnnnnnnnnnnnnnnnnnnnnnnnnnnnnnnnnnnnnnnnnnnnnnnnnnnnnnnnnnnnnnnnnnnnnnnnnnnnnnnnnnnnnnnnnnnnnnnnnnnnnnnnnnnnnnnnnnnnnnnnnnnnnnnnnnnnnnnnnnnnnnnnnnnnnnnnnnnnnnnnnnnnnnnnnnnnnnnnnnnnnnnnnnnnnnnnnnnnnnnnnnnnnnnnnnnnnnnnnnnnnnnnnnnnnnnnnnnnnnnnnnnnnnnnnnnnnnnnnnnnnnnnnnnnnnnnnnnnnnnnnnnnnnnnnnnnnnnnnnnnnnnnnnnnnnnnnnnnnnnnnnnnnnnnnnnnnnnnnnnnnnnnnnnnnnnnnnnnnnnnnnnnnnnnnnnnnnnnnnnnnnnnnnnnnnnnnnnnnnnnnnnnnnnnnnnnnnnnnnnnnnnnnnnnnnnnnnnnnnnnnnnnnnnnnnnnnnnnnnnnnnnnnnnnnnnnnnnnnnnnnnnnnnnnnnnnnnnnnnnnnnnnnnnnnnnnnnnnnnnnnnnnnnnnnnnnnnnnnnnnnnnnnnnnnnnnnnnnnnnnnnnnnnnnnnnnnnnnnnnnnnnnnnnnnnnnnnnnnnnnnnnnnnnnnnnnnnnnnnnnnnnnnnnnnnnnnnnnnnnnnnnnnnnnnnnnnnnnnnnnnnnnnnnnnnnnnnnnnnnnnnnnnnnnnnnnnnnnnnnnnnnnnnnnnnnnnnnnnnnnnnnnnnnnnnnnnnnnnnnnnnnnnnnnnnnnnnnnnnnnnnnnnnnnnnnnnnnnnnnnnnnnnnnnnnnnnnnnnnnnnnnnnnnnnnnnnnnnnnnnnnnnnnnnnnnnnnnnnnnnnnnnnnnnnnnnnnnnnnnnnnnnnnnnnnnnnnnnnnnnnnnnnnnnnnnnnnnnnnnnnnnnnnnnnnnnnnnnnnnnnnnnnnnnnnnnnnnnnnnnnnnnnnnnnnnnnnnnnnnnnnnnnnnnnnnnnnnnnnnnnnnnnnnnnnnnnnnnnnnnnnnnnnnnnnnnnnnnnnnnnnnnnnnnnnnnnnnnnnnnnnnnnnnnnnnnnnnnnnnnnnnnnnnnnnnnnnnnnnnnnnnnnnnnnnnnnnnnnnnnnnnnnnnnnnnnnnnnnnnnnnnnnnnnnnnnnnnnnnnnnnnnnnnnnnnnnnnnnnnnnnnnnnnnnnnnnnnnnnnnnnnnnnnnnnnnnnnnnnnnnnnnnnnnnnnnnnnnnnnnnnnnnnnnnnnnnnnnnnnnnnnnnnnnnnnnnnnnnnnnnnnnnnnnnnnnnnnnnnnnnnnnnnnnnnnnnnnnnnnnnnnnnnnnnnnnnnnnnnnnnnnnnnnnnnnnnnnnnnnnnnnnnnnnnnnnnnnnnnnnnnnnnnnnnnnnnnnnnnnnnnnnnnnnnnnnnnnnnnnnnnnnnnnnnnnnnnnnnnnnnnnnnnnnnnnnnnnnnnnnnnnnnnnnnnnnnnnnnnnnnnnnnnnnnnnnnnnnnnnnnnnnnnnnnnnnnnnnnnnnnnnnnnnnnnnnnnnnnnnnnnnnnnnnnnnnnnnnnnnnnnnnnnnnnnnnnnnnnnnnnnnnnnnnnnnnnnnnnnnnnnnnnnnnnnnnnnnnnnnnnnnnnnnnnnnnnnnnnnnnnnnnnnnnnnnnnnnnnnnnnnnnnnnnnnnnnnnnnnnnnnnnnnnnnnnnnnnnnnnnnnnnnnnnnnnnnnnnnnnnnnnnnnnnnnnnnnnnnnnnnnnnnnnnnnnnnnnnnnnnnnnnnnnnnnnnnnnnnnnnnnnnnnnnnnnnnnnnnnnnnnnnnnnnnnnnnnnnnnnnnnnnnnnnnnnnnnnnnnnnnnnnnnnnnnnnnnnnnnnnnnnnnnnnnnnnnnnnnnnnnnnnnnnnnnnnnnnnnnnnnnnnnnnnnnnnnnnnnnnnnnnnnnnnnnnnnnnnnnnnnnnnnnnnnnnnnnnnnnnnnnnnnnnnnnnnnnnnnnnnnnnnnnnnnnnnnnnnnnnnnnnnnnnnnnnnnnnnnnnnnnnnnnnnnnnnnnnnnnnnnnnnnnnnnnnnnnnnnnnnnnnnnnnnnnnnnnnnnnnnnnnnnnnnnnnnnnnnnnnnnnnnnnnnnnnnnnnnnnnnnnnnnnnnnnnnnnnnnnnnnnnnnnnnnnnnnnnnnnnnnnnnnnnnnnnnnnnnnnnnnnnnnnnnnnnnnnnnnnnnnnnnnnnnnnnnnnnnnnnnnnnnnnnnnnnnnnnnnnnnnnnnnnnnnnnnnnnnnnnnnnnnnnnnnnnnnnnnnnnnnnnnnnnnnnnnnnnnnnnnnnnnnnnnnnnnnnnnnnnnnnnnnnnnnnnnnnnnnnnnnnnnnnnnnnnnnnnnnnnnnnnnnnnnnnnnnnnnnnnnnnnnnnnnnnnnnnnnnnnnnnnnnnnnnnnnnnnnnnnnnnnnnnnnnnnnnnnnnnnnnnnnnnnnnnnnnnnnnnnnnnnnnnnnnnnnnnnnnnnnnnnnnnnnnnnnnnnnnnnnnnnnnnnnnnnnnnnnnnnnnnnnnnnnnnnnnnnnnnnnnnnnnnnnnnnnnnnnnnnnnnnnnnnnnnnnnnnnnnnnnnnnnnnnnnnnnnnnnnnnnnnnnnnnnnnnnnnnnnnnnnnnnnnnnnnnnnnnnnnnnnnnnnnnnnnnnnnnnnnnnnnnnnnnnnnnnnnnnnnnnnnnnnnnnnnnnnnnnnnnnnnnnnnnnnnnnnnnnnnnnnnnnnnnnnnnnnnnnnnnnnnnnnnnnnnnnnnnnnnnnnnnnnnnnnnnnnnnnnnnnnnnnnnnnnnnnnnnnnnnnnnnnnnnnnnnnnnnnnnnnnnnnnnnnnnnnnnnnnnnnnnnnnnnnnnnnnnnnnnnnnnnnnnnnnnnnnnnnnnnnnnnnnnnnnnnnnnnnnnnnnnnnnnnnnnnnnnnnnnnnnnnnnnnnnnnnnnnnnnnnnnnnnnnnnnnnnnnnnnnnnnnnnnnnnnnnnnnnnnnnnnnnnnnnnnnnnnnnnnnnnnnnnnnnnnnnnnnnnnnnnnnnnnnnnnnnnnnnnnnnnnnnnnnnnnnnnnnnnnnnnnnnnnnnnnnnnnnnnnnnnnnnnnnnnnnnnnnnnnnnnnnnnnnnnnnnnnnnnnnnnnnnnnnnnnnnnnnnnnnnnnnnnnnnnnnnnnnnnnnnnnnnnnnnnnnnnnnnnnnnnnnnnnnnnnnnnnnnnnnnnnnnnnnnnnnnnnnnnnnnnnnnnnnnnnnnnnnnnnnnnnnnnnnnnnnnnnnnnnnnnnnnnnnnnnnnnnnnnnnnnnnnnnnnnnnnnnnnnnnnnnnnnnnnnnnnnnnnnnnnnnnnnnnnnnnnnnnnnnnnnnnnnnnnnnnnnnnnnnnnnnnnnnnnnnnnnnnnnnnnnnnnnnnnnnnnnnnnnnnnnnnnnnnnnnnnnnnnnnnnnnnnnnnnnnnnnnnnnnnnnnnnnnnnnnnnnnnnnnnnnnnnnnnnnnnnnnnnnnnnnnnnnnnnnnnnnnnnnnnnnnnnnnnnnnnnnnnnnnnnnnnnnnnnnnnnnnnnnnnnnnnnnnnnnnnnnnnnnnnnnnnnnnnnnnnnnnnnnnnnnnnnnnnnnnnnnnnnnnnnnnnnnnnnnnnnnnnnnnnnnnnnnnnnnnnnnnnnnnnnnnnnnnnnnnnnnnnnnnnnnnnnnnnnnnnnnnnnnnnnnnnnnnnnnnnnnnnnnnnnnnnnnnnnnnnnnnnnnnnnnnnnnnnnnnnnnnnnnnnnnnnnnnnnnnnnnnnnnnnnnnnnnnnnnnnnnnnnnnnnnnnnnnnnnnnnnnnnnnnnnnnnnnnnnnnnnnnnnnnnnnnnnnnnnnnnnnnnnnnnnnnnnnnnnnnnnnnnnnnnnnnnnnnnnnnnnnnnnnnnnnnnnnnnnnnnnnnnnnnnnnnnnnnnnnnnnnnnnnnnnnnnnnnnnnnnnnnnnnnnnnnnnnnnnnnnnnnnnnnnnnnnnnnnnnnnnnnnnnnnnnnnnnnnnnnnnnnnnnnnnnnnnnnnnnnnnnnnnnnnnnnnnnnnnnnnnnnnnnnnnnnnnnnnnnnnnnnnnnnnnnnnnnnnnnnnnnnnnnnnnnnnnnnnnnnnnnnnnnnnnnnnnnnnnnnnnnnnnnnnnnnnnnnnnnnnnnnnnnnnnnnnnnnnnnnnnnnnnnnnnnnnnnnnnnnnnnnnnnnnnnnnnnnnnnnnnnnnnnnnnnnnnnnnnnnnnnnnnnnnnnnnnnnnnnnnnnnnnnnnnnnnnnnnnnnnnnnnnnnnnnnnnnnnnnnnnnnnnnnnnnnnnnnnnnnnnnnnnnnnnnnnnnnnnnnnnnnnnnnnnnnnnnnnnnnnnnnnnnnnnnnnnnnnnnnnnnnnnnnnnnnnnnnnnnnnnnnnnnnnnnnnnnnnnnnnnnnnnnnnnnnnnnnnnnnnnnnnnnnnnnnnnnnnnnnnnnnnnnnnnnnnnnnnnnnnnnnnnnnnnnnnnnnnnnnnnnnnnnnnnnnnnnnnnnnnnnnnnnnnnnnnnnnnnnnnnnnnnnnnnnnnnnnnnnnnnnnnnnnnnnnnnnnnnnnnnnnnnnnnnnnnnnnnnnnnnnnnnnnnnnnnnnnnnnnnnnnnnnnnnnnnnnnnnnnnnnnnnnnnnnnnnnnnnnnnnnnnnnnnnnnnnnnnnnnnnnnnnnnnnnnnnnnnnnnnnnnnnnnnnnnnnnnnnnnnnnnnnnnnnnnnnnnnnnnnnnnnnnnnnnnnnnnnnnnnnnnnnnnnnnnnnnnnnnnnnnnnnnnnnnnnnnnnnnnnnnnnnnnnnnnnnnnnnnnnnnnnnnnnnnnnnnnnnnnnnnnnnnnnnnnnnnnnnnnnnnnnnnnnnnnnnnnnnnnnnnnnnnnnnnnnnnnnnnnnnnnnnnnnnnnnnnnnnnnnnnnnnnnnnnnnnnnnnnnnnnnnnnnnnnnnnnnnnnnnnnnnnnnnnnnnnnnnnnnnnnnnnnnnnnnnnnnnnnnnnnnnnnnnnnnnnnnnnnnnnnnnnnnnnnnnnnnnnnnnnnnnnnnnnnnnnnnnnnnnnnnnnnnnnnnnnnnnnnnnnnnnnnnnnnnnnnnnnnnnnnnnnnnnnnnnnnnnnnnnnnnnnnnnnnnnnnnnnnnnnnnnnnnnnnnnnnnnnnnnnnnnnnnnnnnnnnnnnnnnnnnnnnnnnnnnnnnnnnnnnnnnnnnnnnnnnnnnnnnnnnnnnnnnnnnnnnnnnnnnnnnnnnnnnnnnnnnnnnnnnnnnnnnnnnnnnnnnnnnnnnnnnnnnnnnnnnnnnnnnnnnnnnnnnnnnnnnnnnnnnnnnnnnnnnnnnnnnnnnnnnnnnnnnnnnnnnnnnnnnnnnnnnnnnnnnnnnnnnnnnnnnnnnnnnnnnnnnnnnnnnnnnnnnnnnnnnnnnnnnnnnnnnnnnnnnnnnnnnnnnnnnnnnnnnnnnnnnnnnnnnnnnnnnnnnnnnnnnnnnnnnnnnnnnnnnnnnnnnnnnnnnnnnnnnnnnnnnnnnnnnnnnnnnnnnnnnnnnnnnnnnnnnnnnnnnnnnnnnnnnnnnnnnnnnnnnnnnnnnnnnnnnnnnnnnnnnnnnnnnnnnnnnnnnnnnnnnnnnnnnnnnnnnnnnnnnnnnnnnnnnnnnnnnnnnnnnnnnnnnnnnnnnnnnnnnnnnnnnnnnnnnnnnnnnnnnnnnnnnnnnnnnnnnnnnnnnnnnnnnnnnnnnnnnnnnnnnnnnnnnnnnnnnnnnnnnnnnnnnnnnnnnnnnnnnnnnnnnnnnnnnnnnnnnnnnnnnnnnnnnnnnnnnnnnnnnnnnnnnnnnnnnnnnnnnnnnnnnnnnnnnnnnnnnnnnnnnnnnnnnnnnnnnnnnnnnnnnnnnnnnnnnnnnnnnnnnnnnnnnnnnnnnnnnnnnnnnnnnnnnnnnnnnnnnnnnnnnnnnnnnnnnnnnnnnnnnnnnnnnnnnnnnnnnnnnnnnnnnnnnnnnnnnnnnnnnnnnnnnnnnnnnnnnnnnnnnnnnnnnnnnnnnnnnnnnnnnnnnnnnnnnnnnnnnnnnnnnnnnnnnnnnnnnnnnnnnnnnnnnnnnnnnnnnnnnnnnnnnnnnnnnnnnnnnnnnnnnnnnnnnnnnnnnnnnnnnnnnnnnnnnnnnnnnnnnnnnnnnnnnnnnnnnnnnnnnnnnnnnnnnnnnnnnnnnnnnnnnnnnnnnnnnnnnnnnnnnnnnnnnnnnnnnnnnnnnnnnnnnnnnnnnnnnnnnnnnnnnnnnnnnnnnnnnnnnnnnnnnnnnnnnnnnnnnnnnnnnnnnnnnnnnnnnnnnnnnnnnnnnnnnnnnnnnnnnnnnnnnnnnnnnnnnnnnnnnnnnnnnnnnnnnnnnnnnnnnnnnnnnnnnnnnnnnnnnnnnnnnnnnnnnnnnnnnnnnnnnnnnnnnnnnnnnnnnnnnnnnnnnnnnnnnnnnnnnnnnnnnnnnnnnnnnnnnnnnnnnnnnnnnnnnnnnnnnnnnnnnnnnnnnnnnnnnnnnnnnnnnnnnnnnnnnnnnnnnnnnnnnnnnnnnnnnnnnnnnnnnnnnnnnnnnnnnnnnnnnnnnnnnnnnnnnnnnnnnnnnnnnnnnnnnnnnnnnnnnnnnnnnnnnnnnnnnnnnnnnnnnnnnnnnnnnnnnnnnnnnnnnnnnnnnnnnnnnnnnnnnnnnnnnnnnnnnnnnnnnnnnnnnnnnnnnnnnnnnnnnnnnnnnnnnnnnnnnnnnnnnnnnnnnnnnnnnnnnnnnnnnnnnnnnnnnnnnnnnnnnnnnnnnnnnnnnnnnnnnnnnnnnnnnnnnnnnnnnnnnnnnnnnnnnnnnnnnnnnnnnnnnnnnnnnnnnnnnnnnnnnnnnnnnnnnnnnnnnnnnnnnnnnnnnnnnnnnnnnnnnnnnnnnnnnnnnnnnnnnnnnnnnnnnnnnnnnnnnnnnnnnnnnnnnnnnnnnnnnnnnnnnnnnnnnnnnnnnnnnnnnnnnnnnnnnnnnnnnnnnnnnnnnnnnnnnnnnnnnnnnnnnnnnnnnnnnnnnnnnnnnnnnnnnnnnnnnnnnnnnnnnnnnnnnnnnnnnnnnnnnnnnnnnnnnnnnnnnnnnnnnnnnnnnnnnnnnnnnnnnnnnnnnnnnnnnnnnnnnnnnnnnnnnnnnnnnnnnnnnnnnnnnnnnnnnnnnnnnnnnnnnnnnnnnnnnnnnnnnnnnnnnnnnnnnnnnnnnnnnnnnnnnnnnnnnnnnnnnnnnnnnnnnnnnnnnnnnnnnnnnnnnnnnnnnnnnnnnnnnnnnnnnnnnnnnnnnnnnnnnnnnnnnnnnnnnnnnnnnnnnnnnnnnnnnnnnnnnnnnnnnnnnnnnnnnnnnnnnnnnnnnnnnnnnnnnnnnnnnnnnnnnnnnnnnnnnnnnnnnnnnnnnnnnnnnnnnnnnnnnnnnnnnnnnnnnnnnnnnnnnnnnnnnnnnnnnnnnnnnnnnnnnnnnnnnnnnnnnnnnnnnnnnnnnnnnnnnnnnnnnnnnnnnnnnnnnnnnnnnnnnnnnnnnnnnnnnnnnnnnnnnnnnnnnnnnnnnnnnnnnnnnnnnnnnnnnnnnnnnnnnnnnnnnnnnnnnnnnnnnnnnnnnnnnnnnnnnnnnnnnnnnnnnnnnnnnnnnnnnnnnnnnnnnnnnnnnnnnnnnnnnnnnnnnnnnnnnnnnnnnnnnnnnnnnnnnnnnnnnnnnnnnnnnnnnnnnnnnnnnnnnnnnnnnnnnnnnnnnnnnnnnnnnnnnnnnnnnnnnnnnnnnnnnnnnnnnnnnnnnnnnnnnnnnnnnnnnnnnnnnnnnnnnnnnnnnnnnnnnnnnnnnnnnnnnnnnnnnnnnnnnnnnnnnnnnnnnnnnnnnnnnnnnnnnnnnnnnnnnnnnnnnnnnnnnnnnnnnnnnnnnnnnnnnnnnnnnnnnnnnnnnnnnnnnnnnnnnnnnnnnnnnnnnnnnnnnnnnnnnnnnnnnnnnnnnnnnnnnnnnnnnnnnnnnnnnnnnnnnnnnnnnnnnnnnnnnnnnnnnnnnnnnnnnnnnnnnnnnnnnnnnnnnnnnnnnnnnnnnnnnnnnnnnnnnnnnnnnnnnnnnnnnnnnnnnnnnnnnnnnnnnnnnnnnnnnnnnnnnnnnnnnnnnnnnnnnnnnnnnnnnnnnnnnnnnnnnnnnnnnnnnnnnnnnnnnnnnnnnnnnnnnnnnnnnnnnnnnnnnnnnnnnnnnnnnnnnnnnnnnnnnnnnnnnnnnnnnnnnnnnnnnnnnnnnnnnnnnnnnnnnnnnnnnnnnnnnnnnnnnnnnnnnnnnnnnnnnnnnnnnnnnnnnnnnnnnnnnnnnnnnnnnnnnnnnnnnnnnnnnnnnnnnnnnnnnnnnnnnnnnnnnnnnnnnnnnnnnnnnnnnnnnnnnnnnnnnnnnnnnnnnnnnnnnnnnnnnnnnnnnnnnnnnnnnnnnnnnnnnnnnnnnnnnnnnnnnnnnnnnnnnnnnnnnnnnnnnnnnnnnnnnnnnnnnnnnnnnnnnnnnnnnnnnnnnnnnnnnnnnnnnnnnnnnnnnnnnnnnnnnnnnnnnnnnnnnnnnnnnnnnnnnnnnnnnnnnnnnnnnnnnnnnnnnnnnnnnnnnnnnnnnnnnnnnnnnnnnnnnnnnnnnnnnnnnnnnnnnnnnnnnnnnnnnnnnnnnnnnnnnnnnnnnnnnnnnnnnnnnnnnnnnnnnnnnnnnnnnnnnnnnnnnnnnnnnnnnnnnnnnnnnnnnnnnnnnnnnnnnnnnnnnnnnnnnnnnnnnnnnnnnnnnnnnnnnnnnnnnnnnnnnnnnnnnnnnnnnnnnnnnnnnnnnnnnnnnnnnnnnnnnnnnnnnnnnnnnnnnnnnnnnnnnnnnnnnnnnnnnnnnnnnnnnnnnnnnnnnnnnnnnnnnnnnnnnnnnnnnnnnnnnnnnnnnnnnnnnnnnnnnnnnnnnnnnnnnnnnnnnnnnnnnnnnnnnnnnnnnnnnnnnnnnnnnnnnnnnnnnnnnnnnnnnnnnnnnnnnnnnnnnnnnnnnnnnnnnnnnnnnnnnnnnnnnnnnnnnnnnnnnnnnnnnnnnnnnnnnnnnnnnnnnnnnnnnnnnnnnnnnnnnnnnnnnnnnnnnnnnnnnnnnnnnnnnnnnnnnnnnnnnnnnnnnnnnnnnnnnnnnnnnnnnnnnnnnnnnnnnnnnnnnnnnnnnnnnnnnnnnnnnnnnnnnnnnnnnnnnnnnnnnnnnnnnnnnnnnnnnnnnnnnnnnnnnnnnnnnnnnnnnnnnnnnnnnnnnnnnnnnnnnnnnnnnnnnnnnnnnnnnnnnnnnnnnnnnnnnnnnnnnnnnnnnnnnnnnnnnnnnnnnnnnnnnnnnnnnnnnnnnnnnnnnnnnnnnnnnnnnnnnnnnnnnnnnnnnnnnnnnnnnnnnnnnnnnnnnnnnnnnnnnnnnnnnnnnnnnnnnnnnnnnnnnnnnnnnnnnnnnnnnnnnnnnnnnnnnnnnnnnnnnnnnnnnnnnnnnnnnnnnnnnnnnnnnnnnnnnnnnnnnnnnnnnnnnnnnnnnnnnnnnnnnnnnnnnnnnnnnnnnnnnnnnnnnnnnnnnnnnnnnnnnnnnnnnnnnnnnnnnnnnnnnnnnnnnnnnnnnnnnnnnnnnnnnnnnnnnnnnnnnnnnnnnnnnnnnnnnnnnnnnnnnnnnnnnnnnnnnnnnnnnnnnnnnnnnnnnnnnnnnnnnnnnnnnnnnnnnnnnnnnnnnnnnnnnnnnnnnnnnnnnnnnnnnnnnnnnnnnnnnnnnnnnnnnnnnnnnnnnnnnnnnnnnnnnnnnnnnnnnnnnnnnnnnnnnnnnnnnnnnnnnnnnnnnnnnnnnnnnnnnnnnnnnnnnnnnnnnnnnnnnnnnnnnnnnnnnnnnnnnnnnnnnnnnnnnnnnnnnnnnnnnnnnnnnnnnnnnnnnnnnnnnnnnnnnnnnnnnnnnnnnnnnnnnnnnnnnnnnnnnnnnnnnnnnnnnnnnnnnnnnnnnnnnnnnnnnnnnnnnnnnnnnnnnnnnnnnnnnnnnnnnnnnnnnnnnnnnnnnnnnnnnnnnnnnnnnnnnnnnnnnnnnnnnnnnnnnnnnnnnnnnnnnnnnnnnnnnnnnnnnnnnnnnnnnnnnnnnnnnnnnnnnnnnnnnnnnnnnnnnnnnnnnnnnnnnnnnnnnnnnnnnnnnnnnnnnnnnnnnnnnnnnnnnnnnnnnnnnnnnnnnnnnnnnnnnnnnnnnnnnnnnnnnnnnnnnnnnnnnnnnnnnnnnnnnnnnnnnnnnnnnnnnnnnnnnnnnnnnnnnnnnnnnnnnnnnnnnnnnnnnnnnnnnnnnnnnnnnnnnnnnnnnnnnnnnnnnnnnnnnnnnnnnnnnnnnnnnnnnnnnnnnnnnnnnnnnnnnnnnnnnnnnnnnnnnnnnnnnnnnnnnnnnnnnnnnnnnnnnnnnnnnnnnnnnnnnnnnnnnnnnnnnnnnnnnnnnnnnnnnnnnnnnnnnnnnnnnnnnnnnnnnnnnnnnnnnnnnnnnnnnnnnnnnnnnnnnnnnnnnnnnnnnnnnnnnnnnnnnnnnnnnnnnnnnnnnnnnnnnnnnnnnnnnnnnnnnnnnnnnnnnnnnnnnnnnnnnnnnnnnnnnnnnnnnnnnnnnnnnnnnnnnnnnnnnnnnnnnnnnnnnnnnnnnnnnnnnnnnnnnnnnnnnnnnnnnnnnnnnnnnnnnnnnnnnnnnnnnnnnnnnnnnnnnnnnnnnnnnnnnnnnnnnnnnnnnnnnnnnnnnnnnnnnnnnnnnnnnnnnnnnnnnnnnnnnnnnnnnnnnnnnnnnnnnnnnnnnnnnnnnnnnnnnnnnnnnnnnnnnnnnnnnnnnnnnnnnnnnnnnnnnnnnnnnnnnnnnnnnnnnnnnnnnnnnnnnnnnnnnnnnnnnnnnnnnnnnnnnnnnnnnnnnnnnnnnnnnnnnnnnnnnnnnnnnnnnnnnnnnnnnnnnnnnnnnnnnnnnnnnnnnnnnnnnnnnnnnnnnnnnnnnnnnnnnnnnnnnnnnnnnnnnnnnnnnnnnnnnnnnnnnnnnnnnnnnnnnnnnnnnnnnnnnnnnnnnnnnnnnnnnnnnnnnnnnnnnnnnnnnnnnnnnnnnnnnnnnnnnnnnnnnnnnnnnnnnnnnnnnnnnnnnnnnnnnnnnnnnnnnnnnnnnnnnnnnnnnnnnnnnnnnnnnnnnnnnnnnnnnnnnnnnnnnnnnnnnnnnnnnnnnnnnnnnnnnnnnnnnnnnnnnnnnnnnnnnnnnnnnnnnnnnnnnnnnnnnnnnnnnnnnnnnnnnnnnnnnnnnnnnnnnnnnnnnnnnnnnnnnnnnnnnnnnnnnnnnnnnnnnnnnnnnnnnnnnnnnnnnnnnnnnnnnnnnnnnnnnnnnnnnnnnnnnnnnnnnnnnnnnnnnnnnnnnnnnnnnnnnnnnnnnnnnnnnnnnnnnnnnnnnnnnnnnnnnnnnnnnnnnnnnnnnnnnnnnnnnnnnnnnnnnnnnnnnnnnnnnnnnnnnnnnnnnnnnnnnnnnnnnnnnnnnnnnnnnnnnnnnnnnnnnnnnnnnnnnnnnnnnnnnnnnnnnnnnnnnnnnnnnnnnnnnnnnnnnnnnnnnnnnnnnnnnnnnnnnnnnnnnnnnnnnnnnnnnnnnnnnnnnnnnnnnnnnnnnnnnnnnnnnnnnnnnnnnnnnnnnnnnnnnnnnnnnnnnnnnnnnnnnnnnnnnnnnnnnnnnnnnnnnnnnnnnnnnnnnnnnnnnnnnnnnnnnnnnnnnnnnnnnnnnnnnnnnnnnnnnnnnnnnnnnnnnnnnnnnnnnnnnnnnnnnnnnnnnnnnnnnnnnnnnnnnnnnnnnnnnnnnnnnnnnnnnnnnnnnnnnnnnnnnnnnnnnnnnnnnnnnnnnnnnnnnnnnnnnnnnnnnnnnnnnnnnnnnnnnnnnnnnnnnnnnnnnnnnnnnnnnnnnnnnnnnnnnnnnnnnnnnnnnnnnnnnnnnnnnnnnnnnnnnnnnnnnnnnnnnnnnnnnnnnnnnnnnnnnnnnnnnnnnnnnnnnnnnnnnnnnnnnnnnnnnnnnnnnnnnnnnnnnnnnnnnnnnnnnnnnnnnnnnnnnnnnnnnnnnnnnnnnnnnnnnnnnnnnnnnnnnnnnnnnnnnnnnnnnnnnnnnnnnnnnnnnnnnnnnnnnnnnnnnnnnnnnnnnnnnnnnnnnnnnnnnnnnnnnnnnnnnnnnnnnnnnnnnnnnnnnnnnnnnnnnnnnnnnnnnnnnnnnnnnnnnnnnnnnnnnnnnnnnnnnnnnnnnnnnnnnnnnnnnnnnnnnnnnnnnnnnnnnnnnnnnnnnnnnnnnnnnnnnnnnnnnnnnnnnnnnnnnnnnnnnnnnnnnnnnnnnnnnnnnnnnnnnnnnnnnnnnnnnnnnnnnnnnnnnnnnnnnnnnnnnnnnnnnnnnnnnnnnnnnnnnnnnnnnnnnnnnnnnnnnnnnnnnnnnnnnnnnnnnnnnnnnnnnnnnnnnnnnnnnnnnnnnnnnnnnnnnnnnnnnnnnnnnnnnnnnnnnnnnnnnnnnnnnnnnnnnnnnnnnnnnnnnnnnnnnnnnnnnnnnnnnnnnnnnnnnnnnnnnnnnnnnnnnnnnnnnnnnnnnnnnnnnnnnnnnnnnnnnnnnnnnnnnnnnnnnnnnnnnnnnnnnnnnnnnnnnnnnnnnnnnnnnnnnnnnnnnnnnnnnnnnnnnnnnnnnnnnnnnnnnnnnnnnnnnnnnnnnnnnnnnnnnnnnnnnnnnnnnnnnnnnnnnnnnnnnnnnnnnnnnnnnnnnnnnnnnnnnnnnnnnnnnnnnnnnnnnnnnnnnnnnnnnnnnnnnnnnnnnnnnnnnnnnnnnnnnnnnnnnnnnnnnnnnnnnnnnnnnnnnnnnnnnnnnnnnnnnnnnnnnnnnnnnnnnnnnnnnnnnnnnnnnnnnnnnnnnnnnnnnnnnnnnnnnnnnnnnnnnnnnnnnnnnnnnnnnnnnnnnnnnnnnnnnnnnnnnnnnnnnnnnnnnnnnnnnnnnnnnnnnnnnnnnnnnnnnnnnnnnnnnnnnnnnnnnnnnnnnnnnnnnnnnnnnnnnnnnnnnnnnnnnnnnnnnnnnnnnnnnnnnnnnnnnnnnnnnnnnnnnnnnnnnnnnnnnnnnnnnnnnnnnnnnnnnnnnnnnnnnnnnnnnnnnnnnnnnnnnnnnnnnnnnnnnnnnnnnnnnnnnnnnnnnnnnnnnnnnnnnnnnnnnnnnnnnnnnnnnnnnnnnnnnnnnnnnnnnnnnnnnnnnnnnnnnnnnnnnnnnnnnnnnnnnnnnnnnnnnnnnnnnnnnnnnnnnnnnnnnnnnnnnnnnnnnnnnnnnnnnnnnnnnnnnnnnnnnnnnnnnnnnnnnnnnnnnnnnnnnnnnnnnnnnnnnnnnnnnnnnnnnnnnnnnnnnnnnnnnnnnnnnnnnnnnnnnnnnnnnnnnnnnnnnnnnnnnnnnnnnnnnnnnnnnnnnnnnnnnnnnnnnnnnnnnnnnnnnnnnnnnnnnnnnnnnnnnnnnnnnnnnnnnnnnnnnnnnnnnnnnnnnnnnnnnnnnnnnnnnnnnnnnnnnnnnnnnnnnnnnnnnnnnnnnnnnnnnnnnnnnnnnnnnnnnnnnnnnnnnnnnnnnnnnnnnnnnnnnnnnnnnnnnnnnnnnnnnnnnnnnnnnnnnnnnnnnnnnnnnnnnnnnnnnnnnnnnnnnnnnnnnnnnnnnnnnnnnnnnnnnnnnnnnnnnnnnnnnnnnnnnnnnnnnnnnnnnnnnnnnnnnnnnnnnnnnnnnnnnnnnnnnnnnnnnnnnnnnnnnnnnnnnnnnnnnnnnnnnnnnnnnnnnnnnnnnnnnnnnnnnnnnnnnnnnnnnnnnnnnnnnnnnnnnnnnnnnnnnnnnnnnnnnnnnnnnnnnnnnnnnnnnnnnnnnnnnnnnnnnnnnnnnnnnnnnnnnnnnnnnnnnnnnnnnnnnnnnnnnnnnnnnnnnnnnnnnnnnnnnnnnnnnnnnnnnnnnnnnnnnnnnnnnnnnnnnnnnnnnnnnnnnnnnnnnnnnnnnnnnnnnnnnnnnnnnnnnnnnnnnnnnnnnnnnnnnnnnnnnnnnnnnnnnnnnnnnnnnnnnnnnnnnnnnnnnnnnnnnnnnnnnnnnnnnnnnnnnnnnnnnnnnnnnnnnnnnnnnnnnnnnnnnnnnnnnnnnnnnnnnnnnnnnnnnnnnnnnnnnnnnnnnnnnnnnnnnnnnnnnnnnnnnnnnnnnnnnnnnnnnnnnnnnnnnnnnnnnnnnnnnnnnnnnnnnnnnnnnnnnnnnnnnnnnnnnnnnnnnnnnnnnnnnnnnnnnnnnnnnnnnnnnnnnnnnnnnnnnnnnnnnnnnnnnnnnnnnnnnnnnnnnnnnnnnnnnnnnnnnnnnnnnnnnnnnnnnnnnnnnnnnnnnnnnnnnnnnnnnnnnnnnnnnnnnnnnnnnnnnnnnnnnnnnnnnnnnnnnnnnnnnnnnnnnnnnnnnnnnnnnnnnnnnnnnnnnnnnnnnnnnnnnnnnnnnnnnnnnnnnnnnnnnnnnnnnnnnnnnnnnnnnnnnnnnnnnnnnnnnnnnnnnnnnnnnnnnnnnnnnnnnnnnnnnnnnnnnnnnnnnnnnnnnnnnnnnnnnnnnnnnnnnnnnnnnnnnnnnnnnnnnnnnnnnnnnnnnnnnnnnnnnnnnnnnnnnnnnnnnnnnnnnnnnnnnnnnnnnnnnnnnnnnnnnnnnnnnnnnnnnnnnnnnnnnnnnnnnnnnnnnnnnnnnnnnnnnnnnnnnnnnnnnnnnnnnnnnnnnnnnnnnnnnnnnnnnnnnnnnnnnnnnnnnnnnnnnnnnnnnnnnnnnnnnnnnnnnnnnnnnnnnnnnnnnnnnnnnnnnnnnnnnnnnnnnnnnnnnnnnnnnnnnnnnnnnnnnnnnnnnnnnnnnnnnnnnnnnnnnnnnnnnnnnnnnnnnnnnnnnnnnnnnnnnnnnnnnnnnnnnnnnnnnnnnnnnnnnnnnnnnnnnnnnnnnnnnnnnnnnnnnnnnnnnnnnnnnnnnnnnnnnnnnnnnnnnnnnnnnnnnnnnnnnnnnnnnnnnnnnnnnnnnnnnnnnnnnnnnnnnnnnnnnnnnnnnnnnnnnnnnnnnnnnnnnnnnnnnnnnnnnnnnnnnnnnnnnnnnnnnnnnnnnnnnnnnnnnnnnnnnnnnnnnnnnnnnnnnnnnnnnnnnnnnnnnnnnnnnnnnnnnnnnnnnnnnnnnnnnnnnnnnnnnnnnnnnnnnnnnnnnnnnnnnnnnnnnnnnnnnnnnnnnnnnnnnnnnnnnnnnnnnnnnnnnnnnnnnnnnnnnnnnnnnnnnnnnnnnnnnnnnnnnnnnnnnnnnnnnnnnnnnnnnnnnnnnnnnnnnnnnnnnnnnnnnnnnnnnnnnnnnnnnnnnnnnnnnnnnnnnnnnnnnnnnnnnnnnnnnnnnnnnnnnnnnnnnnnnnnnnnnnnnnnnnnnnnnnnnnnnnnnnnnnnnnnnnnnnnnnnnnnnnnnnnnnnnnnnnnnnnnnnnnnnnnnnnnnnnnnnnnnnnnnnnnnnnnnnnnnnnnnnnnnnnnnnnnnnnnnnnnnnnnnnnnnnnnnnnnnnnnnnnnnnnnnnnnnnnnnnnnnnnnnnnnnnnnnnnnnnnnnnnnnnnnnnnnnnnnnnnnnnnnnnnnnnnnnnnnnnnnnnnnnnnnnnnnnnnnnnnnnnnnnnnnnnnnnnnnnnnnnnnnnnnnnnnnnnnnnnnnnnnnnnnnnnnnnnnnnnnnnnnnnnnnnnnnnnnnnnnnnnnnnnnnnnnnnnnnnnnnnnnnnnnnnnnnnnnnnnnnnnnnnnnnnnnnnnnnnnnnnnnnnnnnnnnnnnnnnnnnnnnnnnnnnnnnnnnnnnnnnnnnnnnnnnnnnnnnnnnnnnnnnnnnnnnnnnnnnnnnnnnnnnnnnnnnnnnnnnnnnnnnnnnnnnnnnnnnnnnnnnnnnnnnnnnnnnnnnnnnnnnnnnnnnnnnnnnnnnnnnnnnnnnnnnnnnnnnnnnnnnnnnnnnnnnnnnnnnnnnnnnnnnnnnnnnnnnnnnnnnnnnnnnnnnnnnnnnnnnnnnnnnnnnnnnnnnnnnnnnnnnnnnnnnnnnnnnnnnnnnnnnnnnnnnnnnnnnnnnnnnnnnnnnnnnnnnnnnnnnnnnnnnnnnnnnnnnnnnnnnnnnnnnnnnnnnnnnnnnnnnnnnnnnnnnnnnnnnnnnnnnnnnnnnnnnnnnnnnnnnnnnnnnnnnnnnnnnnnnnnnnnnnnnnnnnnnnnnnnnnnnnnnnnnnnnnnnnnnnnnnnnnnnnnnnnnnnnnnnnnnnnnnnnnnnnnnnnnnnnnnnnnnnnnnnnnnnnnnnnnnnnnnnnnnnnnnnnnnnnnnnnnnnnnnnnnnnnnnnnnnnnnnnnnnnnnnnnnnnnnnnnnnnnnnnnnnnnnnnnnnnnnnnnnnnnnnnnnnnnnnnnnnnnnnnnnnnnnnnnnnnnnnnnnnnnnnnnnnnnnnnnnnnnnnnnnnnnnnnnnnnnnnnnnnnnnnnnnnnnnnnnnnnnnnnnnnnnnnnnnnnnnnnnnnnnnnnnnnnnnnnnnnnnnnnnnnnnnnnnnnnnnnnnnnnnnnnnnnnnnnnnnnnnnnnnnnnnnnnnnnnnnnnnnnnnnnnnnnnnnnnnnnnnnnnnnnnnnnnnnnnnnnnnnnnnnnnnnnnnnnnnnnnnnnnnnnnnnnnnnnnnnnnnnnnnnnnnnnnnnnnnnnnnnnnnnnnnnnnnnnnnnnnnnnnnnnnnnnnnnnnnnnnnnnnnnnnnnnnnnnnnnnnnnnnnnnnnnnnnnnnnnnnnnnnnnnnnnnnnnnnnnnnnnnnnnnnnnnnnnnnnnnnnnnnnnnnnnnnnnnnnnnnnnnnnnnnnnnnnnnnnnnnnnnnnnnnnnnnnnnnnnnnnnnnnnnnnnnnnnnnnnnnnnnnnnnnnnnnnnnnnnnnnnnnnnnnnnnnnnnnnnnnnnnnnnnnnnnnnnnnnnnnnnnnnnnnnnnnnnnnnnnnnnnnnnnnnnnnnnnnnnnnnnnnnnnnnnnnnnnnnnnnnnnnnnnnnnnnnnnnnnnnnnnnnnnnnnnnnnnnnnnnnnnnnnnnnnnnnnnnnnnnnnnnnnnnnnnnnnnnnnnnnnnnnnnnnnnnnnnnnnnnnnnnnnnnnnnnnnnnnnnnnnnnnnnnnnnnnnnnnnnnnnnnnnnnnnnnnnnnnnnnnnnnnnnnnnnnnnnnnnnnnnnnnnnnnnnnnnnnnnnnnnnnnnnnnnnnnnnnnnnnnnnnnnnnnnnnnnnnnnnnnnnnnnnnnnnnnnnnnnnnnnnnnnnnnnnnnnnnnnnnnnnnnnnnnnnnnnnnnnnnnnnnnnnnnnnnnnnnnnnnnnnnnnnnnnnnnnnnnnnnnnnnnnnnnnnnnnnnnnnnnnnnnnnnnnnnnnnnnnnnnnnnnnnnnnnnnnnnnnnnnnnnnnnnnnnnnnnnnnnnnnnnnnnnnnnnnnnnnnnnnnnnnnnnnnnnnnnnnnnnnnnnnnnnnnnnnnnnnnnnnnnnnnnnnnnnnnnnnnnnnnnnnnnnnnnnnnnnnnnnnnnnnnnnnnnnnnnnnnnnnnnnnnnnnnnnnnnnnnnnnnnnnnnnnnnnnnnnnnnnnnnnnnnnnnnnnnnnnnnnnnnnnnnnnnnnnnnnnnnnnnnnnnnnnnnnnnnnnnnnnnnnnnnnnnnnnnnnnnnnnnnnnnnnnnnnnnnnnnnnnnnnnnnnnnnnnnnnnnnnnnnnnnnnnnnnnnnnnnnnnnnnnnnnnnnnnnnnnnnnnnnnnnnnnnnnnnnnnnnnnnnnnnnnnnnnnnnnnnnnnnnnnnnnnnnnnnnnnnnnnnnnnnnnnnnnnnnnnnnnnnnnnnnnnnnnnnnnnnnnnnnnnnnnnnnnnnnnnnnnnnnnnnnnnnnnnnnnnnnnnnnnnnnnnnnnnnnnnnnnnnnnnnnnnnnnnnnnnnnnnnnnnnnnnnnnnnnnnnnnnnnnnnnnnnnnnnnnnnnnnnnnnnnnnnnnnnnnnnnnnnnnnnnnnnnnnnnnnnnnnnnnnnnnnnnnnnnnnnnnnnnnnnnnnnnnnnnnnnnnnnnnnnnnnnnnnnnnnnnnnnnnnnnnnnnnnnnnnnnnnnnnnnnnnnnnnnnnnnnnnnnnnnnnnnnnnnnnnnnnnnnnnnnnnnnnnnnnnnnnnnnnnnnnnnnnnnnnnnnnnnnnnnnnnnnnnnnnnnnnnnnnnnnnnnnnnnnnnnnnnnnnnnnnnnnnnnnnnnnnnnnnnnnnnnnnnnnnnnnnnnnnnnnnnnnnnnnnnnnnnnnnnnnnnnnnnnnnnnnnnnnnnnnnnnnnnnnnnnnnnnnnnnnnnnnnnnnnnnnnnnnnnnnnnnnnnnnnnnnnnnnnnnnnnnnnnnnnnnnnnnnnnnnnnnnnnnnnnnnnnnnnnnnnnnnnnnnnnnnnnnnnnnnnnnnnnnnnnnnnnnnnnnnnnnnnnnnnnnnnnnnnnnnnnnnnnnnnnnnnnnnnnnnnnnnnnnnnnnnnnnnnnnnnnnnnnnnnnnnnnnnnnnnnnnnnnnnnnnnnnnnnnnnnnnnnnnnnnnnnnnnnnnnnnnnnnnnnnnnnnnnnnnnnnnnnnnnnnnnnnnnnnnnnnnnnnnnnnnnnnnnnnnnnnnnnnnnnnnnnnnnnnnnnnnnnnnnnnnnnnnnnnnnnnnnnnnnnnnnnnnnnnnnnnnnnnnnnnnnnnnnnnnnnnnnnnnnnnnnnnnnnnnnnnnnnnnnnnnnnnnnnnnnnnnnnnnnnnnnnnnnnnnnnnnnnnnnnnnnnnnnnnnnnnnnnnnnnnnnnnnnnnnnnnnnnnnnnnnnnnnnnnnnnnnnnnnnnnnnnnnnnnnnnnnnnnnnnnnnnnnnnnnnnnnnnnnnnnnnnnnnnnnnnnnnnnnnnnnnnnnnnnnnnnnnnnnnnnnnnnnnnnnnnnnnnnnnnnnnnnnnnnnnnnnnnnnnnnnnnnnnnnnnnnnnnnnnnnnnnnnnnnnnnnnnnnnnnnnnnnnnnnnnnnnnnnnnnnnnnnnnnnnnnnnnnnnnnnnnnnnnnnnnnnnnnnnnnnnnnnnnnnnnnnnnnnnnnnnnnnnnnnnnnnnnnnnnnnnnnnnnnnnnnnnnnnnnnnnnnnnnnnnnnnnnnnnnnnnnnnnnnnnnnnnnnnnnnnnnnnnnnnnnnnnnnnnnnnnnnnnnnnnnnnnnnnnnnnnnnnnnnnnnnnnnnnnnnnnnnnnnnnnnnnnnnnnnnnnnnnnnnnnnnnnnnnnnnnnnnnnnnnnnnnnnnnnnnnnnnnnnnnnnnnnnnnnnnnnnnnnnnnnnnnnnnnnnnnnnnnnnnnnnnnnnnnnnnnnnnnnnnnnnnnnnnnnnnnnnnnnnnnnnnnnnnnnnnnnnnnnnnnnnnnnnnnnnnnnnnnnnnnnnnnnnnnnnnnnnnnnnnnnnnnnnnnnnnnnnnnnnnnnnnnnnnnnnnnnnnnnnnnnnnnnnnnnnnnnnnnnnnnnnnnnnnnnnnnnnnnnnnnnnnnnnnnnnnnnnnnnnnnnnnnnnnnnnnnnnnnnnnnnnnnnnnnnnnnnnnnnnnnnnnnnnnnnnnnnnnnnnnnnnnnnnnnnnnnnnnnnnnnnnnnnnnnnnnnnnnnnnnnnnnnnnnnnnnnnnnnnnnnnnnnnnnnnnnnnnnnnnnnnnnnnnnnnnnnnnnnnnnnnnnnnnnnnnnnnnnnnnnnnnnnnnnnnnnnnnnnnnnnnnnnnnnnnnnnnnnnnnnnnnnnnnnnnnnnnnnnnnnnnnnnnnnnnnnnnnnnnnnnnnnnnnnnnnnnnnnnnnnnnnnnnnnnnnnnnnnnnnnnnnnnnnnnnnnnnnnnnnnnnnnnnnnnnnnnnnnnnnnnnnnnnnnnnnnnnnnnnnnnnnnnnnnnnnnnnnnnnnnnnnnnnnnnnnnnnnnnnnnnnnnnnnnnnnnnnnnnnnnnnnnnnnnnnnnnnnnnnnnnnnnnnnnnnnnnnnnnnnnnnnnnnnnnnnnnnnnnnnnnnnnnnnnnnnnnnnnnnnnnnnnnnnnnnnnnnnnnnnnnnnnnnnnnnnnnnnnnnnnnnnnnnnnnnnnnnnnnnnnnnnnnnnnnnnnnnnnnnnnnnnnnnnnnnnnnnnnnnnnnnnnnnnnnnnnnnnnnnnnnnnnnnnnnnnnnnnnnnnnnnnnnnnnnnnnnnnnnnnnnnnnnnnnnnnnnnnnnnnnnnnnnnnnnnnnnnnnnnnnnnnnnnnnnnnnnnnnnnnnnnnnnnnnnnnnnnnnnnnnnnnnnnnnnnnnnnnnnnnnnnnnnnnnnnnnnnnnnnnnnnnnnnnnnnnnnnnnnnnnnnnnnnnnnnnnnnnnnnnnnnnnnnnnnnnnnnnnnnnnnnnnnnnnnnnnnnnnnnnnnnnnnnnnnnnnnnnnnnnnnnnnnnnnnnnnnnnnnnnnnnnnnnnnnnnnnnnnnnnnnnnnnnnnnnnnnnnnnnnnnnnnnnnnnnnnnnnnnnnnnnnnnnnnnnnnnnnnnnnnnnnnnnnnnnnnnnnnnnnnnnnnnnnnnnnnnnnnnnnnnnnnnnnnnnnnnnnnnnnnnnnnnnnnnnnnnnnnnnnnnnnnnnnnnnnnnnnnnnnnnnnnnnnnnnnnnnnnnnnnnnnnnnnnnnnnnnnnnnnnnnnnnnnnnnnnnnnnnnnnnnnnnnnnnnnnnnnnnnnnnnnnnnnnnnnnnnnnnnnnnnnnnnnnnnnnnnnnnnnnnnnnnnnnnnnnnnnnnnnnnnnnnnnnnnnnnnnnnnnnnnnnnnnnnnnnnnnnnnnnnnnnnnnnnnnnnnnnnnnnnnnnnnnnnnnnnnnnnnnnnnnnnnnnnnnnnnnnnnnnnnnnnnnnnnnnnnnnnnnnnnnnnnnnnnnnnnnnnnnnnnnnnnnnnnnnnnnnnnnnnnnnnnnnnnnnnnnnnnnnnnnnnnnnnnnnnnnnnnnnnnnnnnnnnnnnnnnnnnnnnnnnnnnnnnnnnnnnnnnnnnnnnnnnnnnnnnnnnnnnnnnnnnnnnnnnnnnnnnnnnnnnnnnnnnnnnnnnnnnnnnnnnnnnnnnnnnnnnnnnnnnnnnnnnnnnnnnnnnnnnnnnnnnnnnnnnnnnnnnnnnnnnnnnnnnnnnnnnnnnnnnnnnnnnnnnnnnnnnnnnnnnnnnnnnnnnnnnnnnnnnnnnnnnnnnnnnnnnnnnnnnnnnnnnnnnnnnnnnnnnnnnnnnnnnnnnnnnnnnnnnnnnnnnnnnnnnnnnnnnnnnnnnnnnnnnnnnnnnnnnnnnnnnnnnnnnnnnnnnnnnnnnnnnnnnnnnnnnnnnnnnnnnnnnnnnnnnnnnnnnnnnnnnnnnnnnnnnnnnnnnnnnnnnnnnnnnnnnnnnnnnnnnnnnnnnnnnnnnnnnnnnnnnnnnnnnnnnnnnnnnnnnnnnnnnnnnnnnnnnnnnnnnnnnnnnnnnnnnnnnnnnnnnnnnnnnnnnnnnnnnnnnnnnnnnnnnnnnnnnnnnnnnnnnnnnnnnnnnnnnnnnnnnnnnnnnnnnnnnnnnnnnnnnnnnnnnnnnnnnnnnnnnnnnnnnnnnnnnnnnnnnnnnnnnnnnnnnnnnnnnnnnnnnnnnnnnnnnnnnnnnnnnnnnnnnnnnnnnnnnnnnnnnnnnnnnnnnnnnnnnnnnnnnnnnnnnnnnnnnnnnnnnnnnnnnnnnnnnnnnnnnnnnnnnnnnnnnnnnnnnnnnnnnnnnnnnnnnnnnnnnnnnnnnnnnnnnnnnnnnnnnnnnnnnnnnnnnnnnnnnnnnnnnnnnnnnnnnnnnnnnnnnnnnnnnnnnnnnnnnnnnnnnnnnnnnnnnnnnnnnnnnnnnnnnnnnnnnnnnnnnnnnnnnnnnnnnnnnnnnnnnnnnnnnnnnnnnnnnnnnnnnnnnnnnnnnnnnnnnnnnnnnnnnnnnnnnnnnnnnnnnnnnnnnnnnnnnnnnnnnnnnnnnnnnnnnnnnnnnnnnnnnnnnnnnnnnnnnnnnnnnnnnnnnnnnnnnnnnnnnnnnnnnnnnnnnnnnnnnnnnnnnnnnnnnnnnnnnnnnnnnnnnnnnnnnnnnnnnnnnnnnnnnnnnnnnnnnnnnnnnnnnnnnnnnnnnnnnnnnnnnnnnnnnnnnnnnnnnnnnnnnnnnnnnnnnnnnnnnnnnnnnnnnnnnnnnnnnnnnnnnnnnnnnnnnnnnnnnnnnnnnnnnnnnnnnnnnnnnnnnnnnnnnnnnnnnnnnnnnnnnnnnnnnnnnnnnnnnnnnnnnnnnnnnnnnnnnnnnnnnnnnnnnnnnnnnnnnnnnnnnnnnnnnnnnnnnnnnnnnnnnnnnnnnnnnnnnnnnnnnnnnnnnnnnnnnnnnnnnnnnnnnnnnnnnnnnnnnnnnnnnnnnnnnnnnnnnnnnnnnnnnnnnnnnnnnnnnnnnnnnnnnnnnnnnnnnnnnnnnnnnnnnnnnnnnnnnnnnnnnnnnnnnnnnnnnnnnnnnnnnnnnnnnnnnnnnnnnnnnnnnnnnnnnnnnnnnnnnnnnnnnnnnnnnnnnnnnnnnnnnnnnnnnnnnnnnnnnnnnnnnnnnnnnnnnnnnnnnnnnnnnnnnnnnnnnnnnnnnnnnnnnnnnnnnnnnnnnnnnnnnnnnnnnnnnnnnnnnnnnnnnnnnnnnnnnnnnnnnnnnnnnnnnnnnnnnnnnnnnnnnnnnnnnnnnnnnnnnnnnnnnnnnnnnnnnnnnnnnnnnnnnnnnnnnnnnnnnnnnnnnnnnnnnnnnnnnnnnnnnnnnnnnnnnnnnnnnnnnnnnnnnnnnnnnnnnnnnnnnnnnnnnnnnnnnnnnnnnnnnnnnnnnnnnnnnnnnnnnnnnnnnnnnnnnnnnnnnnnnnnnnnnnnnnnnnnnnnnnnnnnnnnnnnnnnnnnnnnnnnnnnnnnnnnnnnnnnnnnnnnnnnnnnnnnnnnnnnnnnnnnnnnnnnnnnnnnnnnnnnnnnnnnnnnnnnnnnnnnnnnnnnnnnnnnnnnnnnnnnnnnnnnnnnnnnnnnnnnnnnnnnnnnnnnnnnnnnnnnnnnnnnnnnnnnnnnnnnnnnnnnnnnnnnnnnnnnnnnnnnnnnnnnnnnnnnnnnnnnnnnnnnnnnnnnnnnnnnnnnnnnnnnnnnnnnnnnnnnnnnnnnnnnnnnnnnnnnnnnnnnnnnnnnnnnnnnnnnnnnnnnnnnnnnnnnnnnnnnnnnnnnnnnnnnnnnnnnnnnnnnnnnnnnnnnnnnnnnnnnnnnnnnnnnnnnnnnnnnnnnnnnnnnnnnnnnnnnnnnnnnnnnnnnnnnnnnnnnnnnnnnnnnnnnnnnnnnnnnnnnnnnnnnnnnnnnnnnnnnnnnnnnnnnnnnnnnnnnnnnnnnnnnnnnnnnnnnnnnnnnnnnnnnnnnnnnnnnnnnnnnnnnnnnnnnnnnnnnnnnnnnnnnnnnnnnnnnnnnnnnnnnnnnnnnnnnnnnnnnnnnnnnnnnnnnnnnnnnnnnnnnnnnnnnnnnnnnnnnnnnnnnnnnnnnnnnnnnnnnnnnnnnnnnnnnnnnnnnnnnnnnnnnnnnnnnnnnnnnnnnnnnnnnnnnnnnnnnnnnnnnnnnnnnnnnnnnnnnnnnnnnnnnnnnnnnnnnnnnnnnnnnnnnnnnnnnnnnnnnnnnnnnnnnnnnnnnnnnnnnnnnnnnnnnnnnnnnnnnnnnnnnnnnnnnnnnnnnnnnnnnnnnnnnnnnnnnnnnnnnnnnnnnnnnnnnnnnnnnnnnnnnnnnnnnnnnnnnnnnnnnnnnnnnnnnnnnnnnnnnnnnnnnnnnnnnnnnnnnnnnnnnnnnnnnnnnnnnnnnnnnnnnnnnnnnnnnnnnnnnnnnnnnnnnnnnnnnnnnnnnnnnnnnnnnnnnnnnnnnnnnnnnnnnnnnnnnnnnnnnnnnnnnnnnnnnnnnnnnnnnnnnnnnnnnnnnnnnnnnnnnnnnnnnnnnnnnnnnnnnnnnnnnnnnnnnnnnnnnnnnnnnnnnnnnnnnnnnnnnnnnnnnnnnnnnnnnnnnnnnnnnnnnnnnnnnnnnnnnnnnnnnnnnnnnnnnnnnnnnnnnnnnnnnnnnnnnnnnnnnnnnnnnnnnnnnnnnnnnnnnnnnnnnnnnnnnnnnnnnnnnnnnnnnnnnnnnnnnnnnnnnnnnnnnnnnnnnnnnnnnnnnnnnnnnnnnnnnnnnnnnnnnnnnnnnnnnnnnnnnnnnnnnnnnnnnnnnnnnnnnnnnnnnnnnnnnnnnnnnnnnnnnnnnnnnnnnnnnnnnnnnnnnnnnnnnnnnnnnnnnnnnnnnnnnnnnnnnnnnnnnnnnnnnnnnnnnnnnnnnnnnnnnnnnnnnnnnnnnnnnnnnnnnnnnnnnnnnnnnnnnnnnnnnnnnnnnnnnnnnnnnnnnnnnnnnnnnnnnnnnnnnnnnnnnnnnnnnnnnnnnnnnnnnnnnnnnnnnnnnnnnnnnnnnnnnnnnnnnnnnnnnnnnnnnnnnnnnnnnnnnnnnnnnnnnnnnnnnnnnnnnnnnnnnnnnnnnnnnnnnnnnnnnnnnnnnnnnnnnnnnnnnnnnnnnnnnnnnnnnnnnnnnnnnnnnnnnnnnnnnnnnnnnnnnnnnnnnnnnnnnnnnnnnnnnnnnnnnnnnnnnnnnnnnnnnnnnnnnnnnnnnnnnnnnnnnnnnnnnnnnnnnnnnnnnnnnnnnnnnnnnnnnnnnnnnnnnnnnnnnnnnnnnnnnnnnnnnnnnnnnnnnnnnnnnnnnnnnnnnnnnnnnnnnnnnnnnnnnnnnnnnnnnnnnnnnnnnnnnnnnnnnnnnnnnnnnnnnnnnnnnnnnnnnnnnnnnnnnnnnnnnnnnnnnnnnnnnnnnnnnnnnnnnnnnnnnnnnnnnnnnnnnnnnnnnnnnnnnnnnnnnnnnnnnnnnnnnnnnnnnnnnnnnnnnnnnnnnnnnnnnnnnnnnnnnnnnnnnnnnnnnnnnnnnnnnnnnnnnnnnnnnnnnnnnnnnnnnnnnnnnnnnnnnnnnnnnnnnnnnnnnnnnnnnnnnnnnnnnnnnnnnnnnnnnnnnnnnnnnnnnnnnnnnnnnnnnnnnnnnnnnnnnnnnnnnnnnnnnnnnnnnnnnnnnnnnnnnnnnnnnnnnnnnnnnnnnnnnnnnnnnnnnnnnnnnnnnnnnnnnnnnnnnnnnnnnnnnnnnnnnnnnnnnnnnnnnnnnnnnnnnnnnnnnnnnnnnnnnnnnnnnnnnnnnnnnnnnnnnnnnnnnnnnnnnnnnnnnnnnnnnnnnnnnnnnnnnnnnnnnnnnnnnnnnnnnnnnnnnnnnnnnnnnnnnnnnnnnnnnnnnnnnnnnnnnnnnnnnnnnnnnnnnnnnnnnnnnnnnnnnnnnnnnnnnnnnnnnnnnnnnnnnnnnnnnnnnnnnnnnnnnnnnnnnnnnnnnnnnnnnnnnnnnnnnnnnnnnnnnnnnnnnnnnnnnnnnnnnnnnnnnnnnnnnnnnnnnnnnnnnnnnnnnnnnnnnnnnnnnnnnnnnnnnnnnnnnnnnnnnnnnnnnnnnnnnnnnnnnnnnnnnnnnnnnnnnnnnnnnnnnnnnnnnnnnnnnnnnnnnnnnnnnnnnnnnnnnnnnnnnnnnnnnnnnnnnnnnnnnnnnnnnnnnnnnnnnnnnnnnnnnnnnnnnnnnnnnnnnnnnnnnnnnnnnnnnnnnnnnnnnnnnnnnnnnnnnnnnnnnnnnnnnnnnnnnnnnnnnnnnnnnnnnnnnnnnnnnnnnnnnnnnnnnnnnnnnnnnnnnnnnnnnnnnnnnnnnnnnnnnnnnnnnnnnnnnnnnnnnnnnnnnnnnnnnnnnnnnnnnnnnnnnnnnnnnnnnnnnnnnnnnnnnnnnnnnnnnnnnnnnnnnnnnnnnnnnnnnnnnnnnnnnnnnnnnnnnnnnnnnnnnnnnnnnnnnnnnnnnnnnnnnnnnnnnnnnnnnnnnnnnnnnnnnnnnnnnnnnnnnnnnnnnnnnnnnnnnnnnnnnnnnnnnnnnnnnnnnnnnnnnnnnnnnnnnnnnnnnnnnnnnnnnnnnnnnnnnnnnnnnnnnnnnnnnnnnnnnnnnnnnnnnnnnnnnnnnnnnnnnnnnnnnnnnnnnnnnnnnnnnnnnnnnnnnnnnnnnnnnnnnnnnnnnnnnnnnnnnnnnnnnnnnnnnnnnnnnnnnnnnnnnnnnnnnnnnnnnnnnnnnnnnnnnnnnnnnnnnnnnnnnnnnnnnnnnnnnnnnnnnnnnnnnnnnnnnnnnnnnnnnnnnnnnnnnnnnnnnnnnnnnnnnnnnnnnnnnnnnnnnnnnnnnnnnnnnnnnnnnnnnnnnnnnnnnnnnnnnnnnnnnnnnnnnnnnnnnnnnnnnnnnnnnnnnnnnnnnnnnnnnnnnnnnnnnnnnnnnnnnnnnnnnnnnnnnnnnnnnnnnnnnnnnnnnnnnnnnnnnnnnnnnnnnnnnnnnnnnnnnnnnnnnnnnnnnnnnnnnnnnnnnnnnnnnnnnnnnnnnnnnnnnnnnnnnnnnnnnnnnnnnnnnnnnnnnnnnnnnnnnnnnnnnnnnnnnnnnnnnnnnnnnnnnnnnnnnnnnnnnnnnnnnnnnnnnnnnnnnnnnnnnnnnnnnnnnnnnnnnnnnnnnnnnnnnnnnnnnnnnnnnnnnnnnnnnnnnnnnnnnnnnnnnnnnnnnnnnnnnnnnnnnnnnnnnnnnnnnnnnnnnnnnnnnnnnnnnnnnnnnnnnnnnnnnnnnnnnnnnnnnnnnnnnnnnnnnnnnnnnnnnnnnnnnnnnnnnnnnnnnnnnnnnnnnnnnnnnnnnnnnnnnnnnnnnnnnnnnnnnnnnnnnnnnnnnnnnnnnnnnnnnnnnnnnnnnnnnnnnnnnnnnnnnnnnnnnnnnnnnnnnnnnnnnnnnnnnnnnnnnnnnnnnnnnnnnnnnnnnnnnnnnnnnnnnnnnnnnnnnnnnnnnnnnnnnnnnnnnnnnnnnnnnnnnnnnnnnnnnnnnnnnnnnnnnnnnnnnnnnnnnnnnnnnnnnnnnnnnnnnnnnnnnnnnnnnnnnnnnnnnnnnnnnnnnnnnnnnnnnnnnnnnnnnnnnnnnnnnnnnnnnnnnnnnnnnnnnnnnnnnnnnnnnnnnnnnnnnnnnnnnnnnnnnnnnnnnnnnnnnnnnnnnnnnnnnnnnnnnnnnnnnnnnnnnnnnnnnnnnnnnnnnnnnnnnnnnnnnnnnnnnnnnnnnnnnnnnnnnnnnnnnnnnnnnnnnnnnnnnnnnnnnnnnnnnnnnnnnnnnnnnnnnnnnnnnnnnnnnnnnnnnnnnnnnnnnnnnnnnnnnnnnnnnnnnnnnnnnnnnnnnnnnnnnnnnnnnnnnnnnnnnnnnnnnnnnnnnnnnnnnnnnnnnnnnnnnnnnnnnnnnnnnnnnnnnnnnnnnnnnnnnnnnnnnnnnnnnnnnnnnnnnnnnnnnnnnnnnnnnnnnnnnnnnnnnnnnnnnnnnnnnnnnnnnnnnnnnnnnnnnnnnnnnnnnnnnnnnnnnnnnnnnnnnnnnnnnnnnnnnnnnnnnnnnnnnnnnnnnnnnnnnnnnnnnnnnnnnnnnnnnnnnnnnnnnnnnnnnnnnnnnnnnnnnnnnnnnnnnnnnnnnnnnnnnnnnnnnnnnnnnnnnnnnnnnnnnnnnnnnnnnnnnnnnnnnnnnnnnnnnnnnnnnnnnnnnnnnnnnnnnnnnnnnnnnnnnnnnnnnnnnnnnnnnnnnnnnnnnnnnnnnnnnnnnnnnnnnnnnnnnnnnnnnnnnnnnnnnnnnnnnnnnnnnnnnnnnnnnnnnnnnnnnnnnnnnnnnnnnnnnnnnnnnnnnnnnnnnnnnnnnnnnnnnnnnnnnnnnnnnnnnnnnnnnnnnnnnnnnnnnnnnnnnnnnnnnnnnnnnnnnnnnnnnnnnnnnnnnnnnnnnnnnnnnnnnnnnnnnnnnnnnnnnnnnnnnnnnnnnnnnnnnnnnnnnnnnnnnnnnnnnnnnnnnnnnnnnnnnnnnnnnnnnnnnnnnnnnnnnnnnnnnnnnnnnnnnnnnnnnnnnnnnnnnnnnnnnnnnnnnnnnnnnnnnnnnnnnnnnnnnnnnnnnnnnnnnnnnnnnnnnnnnnnnnnnnnnnnnnnnnnnnnnnnnnnnnnnnnnnnnnnnnnnnnnnnnnnnnnnnnnnnnnnnnnnnnnnnnnnnnnnnnnnnnnnnnnnnnnnnnnnnnnnnnnnnnnnnnnnnnnnnnnnnnnnnnnnnnnnnnnnnnnnnnnnnnnnnnnnnnnnnnnnnnnnnnnnnnnnnnnnnnnnnnnnnnnnnnnnnnnnnnnnnnnnnnnnnnnnnnnnnnnnnnnnnnnnnnnnnnnnnnnnnnnnnnnnnnnnnnnnnnnnnnnnnnnnnnnnnnnnnnnnnnnnnnnnnnnnnnnnnnnnnnnnnnnnnnnnnnnnnnnnnnnnnnnnnnnnnnnnnnnnnnnnnnnnnnnnnnnnnnnnnnnnnnnnnnnnnnnnnnnnnnnnnnnnnnnnnnnnnnnnnnnnnnnnnnnnnnnnnnnnnnnnnnnnnnnnnnnnnnnnnnnnnnnnnnnnnnnnnnnnnnnnnnnnnnnnnnnnnnnnnnnnnnnnnnnnnnnnnnnnnnnnnnnnnnnnnnnnnnnnnnnnnnnnnnnnnnnnnnnnnnnnnnnnnnnnnnnnnnnnnnnnnnnnnnnnnnnnnnnnnnnnnnnnnnnnnnnnnnnnnnnnnnnnnnnnnnnnnnnnnnnnnnnnnnnnnnnnnnnnnnnnnnnnnnnnnnnnnnnnnnnnnnnnnnnnnnnnnnnnnnnnnnnnnnnnnnnnnnnnnnnnnnnnnnnnnnnnnnnnnnnnnnnnnnnnnnnnnnnnnnnnnnnnnnnnnnnnnnnnnnnnnnnnnnnnnnnnnnnnnnnnnnnnnnnnnnnnnnnnnnnnnnnnnnnnnnnnnnnnnnnnnnnnnnnnnnnnnnnnnnnnnnnnnnnnnnnnnnnnnnnnnnnnnnnnnnnnnnnnnnnnnnnnnnnnnnnnnnnnnnnnnnnnnnnnnnnnnnnnnnnnnnnnnnnnnnnnnnnnnnnnnnnnnnnnnnnnnnnnnnnnnnnnnnnnnnnnnnnnnnnnnnnnnnnnnnnnnnnnnnnnnnnnnnnnnnnnnnnnnnnnnnnnnnnnnnnnnnnnnnnnnnnnnnnnnnnnnnnnnnnnnnnnnnnnnnnnnnnnnnnnnnnnnnnnnnnnnnnnnnnnnnnnnnnnnnnnnnnnnnnnnnnnnnnnnnnnnnnnnnnnnnnnnnnnnnnnnnnnnnnnnnnnnnnnnnnnnnnnnnnnnnnnnnnnnnnnnnnnnnnnnnnnnnnnnnnnnnnnnnnnnnnnnnnnnnnnnnnnnnnnnnnnnnnnnnnnnnnnnnnnnnnnnnnnnnnnnnnnnnnnnnnnnnnnnnnnnnnnnnnnnnnnnnnnnnnnnnnnnnnnnnnnnnnnnnnnnnnnnnnnnnnnnnnnnnnnnnnnnnnnnnnnnnnnnnnnnnnnnnnnnnnnnnnnnnnnnnnnnnnnnnnnnnnnnnnnnnnnnnnnnnnnnnnnnnnnnnnnnnnnnnnnnnnnnnnnnnnnnnnnnnnnnnnnnnnnnnnnnnnnnnnnnnnnnnnnnnnnnnnnnnnnnnnnnnnnnnnnnnnnnnnnnnnnnnnnnnnnnnnnnnnnnnnnnnnnnnnnnnnnnnnnnnnnnnnnnnnnnnnnnnnnnnnnnnnnnnnnnnnnnnnnnnnnnnnnnnnnnnnnnnnnnnnnnnnnnnnnnnnnnnnnnnnnnnnnnnnnnnnnnnnnnnnnnnnnnnnnnnnnnnnnnnnnnnnnnnnnnnnnnnnnnnnnnnnnnnnnnnnnnnnnnnnnnnnnnnnnnnnnnnnnnnnnnnnnnnnnnnnnnnnnnnnnnnnnnnnnnnnnnnnnnnnnnnnnnnnnnnnnnnnnnnnnnnnnnnnnnnnnnnnnnnnnnnnnnnnnnnnnnnnnnnnnnnnnnnnnnnnnnnnnnnnnnnnnnnnnnnnnnnnnnnnnnnnnnnnnnnnnnnnnnnnnnnnnnnnnnnnnnnnnnnnnnnnnnnnnnnnnnnnnnnnnnnnnnnnnnnnnnnnnnnnnnnnnnnnnnnnnnnnnnnnnnnnnnnnnnnnnnnnnnnnnnnnnnnnnnnnnnnnnnnnnnnnnnnnnnnnnnnnnnnnnnnnnnnnnnnnnnnnnnnnnnnnnnnnnnnnnnnnnnnnnnnnnnnnnnnnnnnnnnnnnnnnnnnnnnnnnnnnnnnnnnnnnnnnnnnnnnnnnnnnnnnnnnnnnnnnnnnnnnnnnnnnnnnnnnnnnnnnnnnnnnnnnnnnnnnnnnnnnnnnnnnnnnnnnnnnnnnnnnnnnnnnnnnnnnnnnnnnnnnnnnnnnnnnnnnnnnnnnnnnnnnnnnnnnnnnnnnnnnnnnnnnnnnnnnnnnnnnnnnnnnnnnnnnnnnnnnnnnnnnnnnnnnnnnnnnnnnnnnnnnnnnnnnnnnnnnnnnnnnnnnnnnnnnnnnnnnnnnnnnnnnnnnnnnnnnnnnnnnnnnnnnnnnnnnnnnnnnnnnnnnnnnnnnnnnnnnnnnnnnnnnnnnnnnnnnnnnnnnnnnnnnnnnnnnnnnnnnnnnnnnnnnnnnnnnnnnnnnnnnnnnnnnnnnnnnnnnnnnnnnnnnnnnnnnnnnnnnnnnnnnnnnnnnnnnnnnnnnnnnnnnnnnnnnnnnnnnnnnnnnnnnnnnnnnnnnnnnnnnnnnnnnnnnnnnnnnnnnnnnnnnnnnnnnnnnnnnnnnnnnnnnnnnnnnnnnnnnnnnnnnnnnnnnnnnnnnnnnnnnnnnnnnnnnnnnnnnnnnnnnnnnnnnnnnnnnnnnnnnnnnnnnnnnnnnnnnnnnnnnnnnnnnnnnnnnnnnnnnnnnnnnnnnnnnnnnnnnnnnnnnnnnnnnnnnnnnnnnnnnnnnnnnnnnnnnnnnnnnnnnnnnnnnnnnnnnnnnnnnnnnnnnnnnnnnnnnnnnnnnnnnnnnnnnnnnnnnnnnnnnnnnnnnnnnnnnnnnnnnnnnnnnnnnnnnnnnnnnnnnnnnnnnnnnnnnnnnnnnnnnnnnnnnnnnnnnnnnnnnnnnnnnnnnnnnnnnnnnnnnnnnnnnnnnnnnnnnnnnnnnnnnnnnnnnnnnnnnnnnnnnnnnnnnnnnnnnnnnnnnnnnnnnnnnnnnnnnnnnnnnnnnnnnnnnnnnnnnnnnnnnnnnnnnnnnnnnnnnnnnnnnnnnnnnnnnnnnnnnnnnnnnnnnnnnnnnnnnnnnnnnnnnnnnnnnnnnnnnnnnnnnnnnnnnnnnnnnnnnnnnnnnnnnnnnnnnnnnnnnnnnnnnnnnnnnnnnnnnnnnnnnnnnnnnnnnnnnnnnnnnnnnnnnnnnnnnnnnnnnnnnnnnnnnnnnnnnnnnnnnnnnnnnnnnnnnnnnnnnnnnnnnnnnnnnnnnnnnnnnnnnnnnnnnnnnnnnnnnnnnnnnnnnnnnnnnnnnnnnnnnnnnnnnnnnnnnnnnnnnnnnnnnnnnnnnnnnnnnnnnnnnnnnnnnnnnnnnnnnnnnnnnnnnnnnnnnnnnnnnnnnnnnnnnnnnnnnnnnnnnnnnnnnnnnnnnnnnnnnnnnnnnnnnnnnnnnnnnnnnnnnnnnnnnnnnnnnnnnnnnnnnnnnnnnnnnnnnnnnnnnnnnnnnnnnnnnnnnnnnnnnnnnnnnnnnnnnnnnnnnnnnnnnnnnnnnnnnnnnnnnnnnnnnnnnnnnnnnnnnnnnnnnnnnnnnnnnnnnnnnnnnnnnnnnnnnnnnnnnnnnnnnnnnnnnnnnnnnnnnnnnnnnnnnnnnnnnnnnnnnnnnnnnnnnnnnnnnnnnnnnnnnnnnnnnnnnnnnnnnnnnnnnnnnnnnnnnnnnnnnnnnnnnnnnnnnnnnnnnnnnnnnnnnnnnnnnnnnnnnnnnnnnnnnnnnnnnnnnnnnnnnnnnnnnnnnnnnnnnnnnnnnnnnnnnnnnnnnnnnnnnnnnnnnnnnnnnnnnnnnnnnnnnnnnnnnnnnnnnnnnnnnnnnnnnnnnnnnnnnnnnnnnnnnnnnnnnnnnnnnnnnnnnnnnnnnnnnnnnnnnnnnnnnnnnnnnnnnnnnnnnnnnnnnnnnnnnnnnnnnnnnnnnnnnnnnnnnnnnnnnnnnnnnnnnnnnnnnnnnnnnnnnnnnnnnnnnnnnnnnnnnnnnnnnnnnnnnnnnnnnnnnnnnnnnnnnnnnnnnnnnnnnnnnnnnnnnnnnnnnnnnnnnnnnnnnnnnnnnnnnnnnnnnnnnnnnnnnnnnnnnnnnnnnnnnnnnnnnnnnnnnnnnnnnnnnnnnnnnnnnnnnnnnnnnnnnnnnnnnnnnnnnnnnnnnnnnnnnnnnnnnnnnnnnnnnnnnnnnnnnnnnnnnnnnnnnnnnnnnnnnnnnnnnnnnnnnnnnnnnnnnnnnnnnnnnnnnnnnnnnnnnnnnnnnnnnnnnnnnnnnnnnnnnnnnnnnnnnnnnnnnnnnnnnnnnnnnnnnnnnnnnnnnnnnnnnnnnnnnnnnnnnnnnnnnnnnnnnnnnnnnnnnnnnnnnnnnnnnnnnnnnnnnnnnnnnnnnnnnnnnnnnnnnnnnnnnnnnnnnnnnnnnnnnnnnnnnnnnnnnnnnnnnnnnnnnnnnnnnnnnnnnnnnnnnnnnnnnnnnnnnnnnnnnnnnnnnnnnnnnnnnnnnnnnnnnnnnnnnnnnnnnnnnnnnnnnnnnnnnnnnnnnnnnnnnnnnnnnnnnnnnnnnnnnnnnnnnnnnnnnnnnnnnnnnnnnnnnnnnnnnnnnnnnnnnnnnnnnnnnnnnnnnnnnnnnnnnnnnnnnnnnnnnnnnnnnnnnnnnnnnnnnnnnnnnnnnnnnnnnnnnnnnnnnnnnnnnnnnnnnnnnnnnnnnnnnnnnnnnnnnnnnnnnnnnnnnnnnnnnnnnnnnnnnnnnnnnnnnnnnnnnnnnnnnnnnnnnnnnnnnnnnnnnnnnnnnnnnnnnnnnnnnnnnnnnnnnnnnnnnnnnnnnnnnnnnnnnnnnnnnnnnnnnnnnnnnnnnnnnnnnnnnnnnnnnnnnnnnnnnnnnnnnnnnnnnnnnnnnnnnnnnnnnnnnnnnnnnnnnnnnnnnnnnnnnnnnnnnnnnnnnnnnnnnnnnnnnnnnnnnnnnnnnnnnnnnnnnnnnnnnnnnnnnnnnnnnnnnnnnnnnnnnnnnnnnnnnnnnnnnnnnnnnnnnnnnnnnnnnnnnnnnnnnnnnnnnnnnnnnnnnnnnnnnnnnnnnnnnnnnnnnnnnnnnnnnnnnnnnnnnnnnnnnnnnnnnnnnnnnnnnnnnnnnnnnnnnnnnnnnnnnnnnnnnnnnnnnnnnnnnnnnnnnnnnnnnnnnnnnnnnnnnnnnnnnnnnnnnnnnnnnnnnnnnnnnnnnnnnnnnnnnnnnnnnnnnnnnnnnnnnnnnnnnnnnnnnnnnnnnnnnnnnnnnnnnnnnnnnnnnnnnnnnnnnnnnnnnnnnnnnnnnnnnnnnnnnnnnnnnnnnnnnnnnnnnnnnnnnnnnnnnnnnnnnnnnnnnnnnnnnnnnnnnnnnnnnnnnnnnnnnnnnnnnnnnnnnnnnnnnnnnnnnnnnnnnnnnnnnnnnnnnnnnnnnnnnnnnnnnnnnnnnnnnnnnnnnnnnnnnnnnnnnnnnnnnnnnnnnnnnnnnnnnnnnnnnnnnnnnnnnnnnnnnnnnnnnnnnnnnnnnnnnnnnnnnnnnnnnnnnnnnnnnnnnnnnnnnnnnnnnnnnnnnnnnnnnnnnnnnnnnnnnnnnnnnnnnnnnnnnnnnnnnnnnnnnnnnnnnnnnnnnnnnnnnnnnnnnnnnnnnnnnnnnnnnnnnnnnnnnnnnnnnnnnnnnnnnnnnnnnnnnnnnnnnnnnnnnnnnnnnnnnnnnnnnnnnnnnnnnnnnnnnnnnnnnnnnnnnnnnnnnnnnnnnnnnnnnnnnnnnnnnnnnnnnnnnnnnnnnnnnnnnnnnnnnnnnnnnnnnnnnnnnnnnnnnnnnnnnnnnnnnnnnnnnnnnnnnnnnnnnnnnnnnnnnnnnnnnnnnnnnnnnnnnnnnnnnnnnnnnnnnnnnnnnnnnnnnnnnnnnnnnnnnnnnnnnnnnnnnnnnnnnnnnnnnnnnnnnnnnnnnnnnnnnnnnnnnnnnnnnnnnnnnnnnnnnnnnnnnnnnnnnnnnnnnnnnnnnnnnnnnnnnnnnnnnnnnnnnnnnnnnnnnnnnnnnnnnnnnnnnnnnnnnnnnnnnnnnnnnnnnnnnnnnnnnnnnnnnnnnnnnnnnnnnnnnnnnnnnnnnnnnnnnnnnnnnnnnnnnnnnnnnnnnnnnnnnnnnnnnnnnnnnnnnnnnnnnnnnnnnnnnnnnnnnnnnnnnnnnnnnnnnnnnnnnnnnnnnnnnnnnnnnnnnnnnnnnnnnnnnnnnnnnnnnnnnnnnnnnnnnnnnnnnnnnnnnnnnnnnnnnnnnnnnnnnnnnnnnnnnnnnnnnnnnnnnnnnnnnnnnnnnnnnnnnnnnnnnnnnnnnnnnnnnnnnnnnnnnnnnnnnnnnnnnnnnnnnnnnnnnnnnnnnnnnnnnnnnnnnnnnnnnnnnnnnnnnnnnnnnnnnnnnnnnnnnnnnnnnnnnnnnnnnnnnnnnnnnnnnnnnnnnnnnnnnnnnnnnnnnnnnnnnnnnnnnnnnnnnnnnnnnnnnnnnnnnnnnnnnnnnnnnnnnnnnnnnnnnnnnnnnnnnnnnnnnnnnnnnnnnnnnnnnnnnnnnnnnnnnnnnnnnnnnnnnnnnnnnnnnnnnnnnnnnnnnnnnnnnnnnnnnnnnnnnnnnnnnnnnnnnnnnnnnnnnnnnnnnnnnnnnnnnnnnnnnnnnnnnnnnnnnnnnnnnnnnnnnnnnnnnnnnnnnnnnnnnnnnnnnnnnnnnnnnnnnnnnnnnnnnnnnnnnnnnnnnnnnnnnnnnnnnnnnnnnnnnnnnnnnnnnnnnnnnnnnnnnnnnnnnnnnnnnnnnnnnnnnnnnnnnnnnnnnnnnnnnnnnnnnnnnnnnnnnnnnnnnnnnnnnnnnnnnnnnnnnnnnnnnnnnnnnnnnnnnnnnnnnnnnnnnnnnnnnnnnnnnnnnnnnnnnnnnnnnnnnnnnnnnnnnnnnnnnnnnnnnnnnnnnnnnnnnnnnnnnnnnnnnnnnnnnnnnnnnnnnnnnnnnnnnnnnnnnnnnnnnnnnnnnnnnnnnnnnnnnnnnnnnnnnnnnnnnnnnnnnnnnnnnnnnnnnnnnnnnnnnnnnnnnnnnnnnnnnnnnnnnnnnnnnnnnnnnnnnnnnnnnnnnnnnnnnnnnnnnnnnnnnnnnnnnnnnnnnnnnnnnnnnnnnnnnnnnnnnnnnnnnnnnnnnnnnnnnnnnnnnnnnnnnnnnnnnnnnnnnnnnnnnnnnnnnnnnnnnnnnnnnnnnnnnnnnnnnnnnnnnnnnnnnnnnnnnnnnnnnnnnnnnnnnnnnnnnnnnnnnnnnnnnnnnnnnnnnnnnnnnnnnnnnnnnnnnnnnnnnnnnnnnnnnnnnnnnnnnnnnnnnnnnnnnnnnnnnnnnnnnnnnnnnnnnnnnnnnnnnnnnnnnnnnnnnnnnnnnnnnnnnnnnnnnnnnnnnnnnnnnnnnnnnnnnnnnnnnnnnnnnnnnnnnnnnnnnnnnnnnnnnnnnnnnnnnnnnnnnnnnnnnnnnnnnnnnnnnnnnnnnnnnnnnnnnnnnnnnnnnnnnnnnnnnnnnnnnnnnnnnnnnnnnnnnnnnnnnnnnnnnnnnnnnnnnnnnnnnnnnnnnnnnnnnnnnnnnnnnnnnnnnnnnnnnnnnnnnnnnnnnnnnnnnnnnnnnnnnnnnnnnnnnnnnnnnnnnnnnnnnnnnnnnnnnnnnnnnnnnnnnnnnnnnnnnnnnnnnnnnnnnnnnnnnnnnnnnnnnnnnnnnnnnnnnnnnnnnnnnnnnnnnnnnnnnnnnnnnnnnnnnnnnnnnnnnnnnnnnnnnnnnnnnnnnnnnnnnnnnnnnnnnnnnnnnnnnnnnnnnnnnnnnnnnnnnnnnnnnnnnnnnnnnnnnnnnnnnnnnnnnnnnnnnnnnnnnnnnnnnnnnnnnnnnnnnnnnnnnnnnnnnnnnnnnnnnnnnnnnnnnnnnnnnnnnnnnnnnnnnnnnnnnnnnnnnnnnnnnnnnnnnnnnnnnnnnnnnnnnnnnnnnnnnnnnnnnnnnnnnnnnnnnnnnnnnnnnnnnnnnnnnnnnnnnnnnnnnnnnnnnnnnnnnnnnnnnnnnnnnnnnnnnnnnnnnnnnnnnnnnnnnnnnnnnnnnnnnnnnnnnnnnnnnnnnnnnnnnnnnnnnnnnnnnnnnnnnnnnnnnnnnnnnnnnnnnnnnnnnnnnnnnnnnnnnnnnnnnnnnnnnnnnnnnnnnnnnnnnnnnnnnnnnnnnnnnnnnnnnnnnnnnnnnnnnnnnnnnnnnnnnnnnnnnnnnnnnnnnnnnnnnnnnnnnnnnnnnnnnnnnnnnnnnnnnnnnnnnnnnnnnnnnnnnnnnnnnnnnnnnnnnnnnnnnnnnnnnnnnnnnnnnnnnnnnnnnnnnnnnnnnnnnnnnnnnnnnnnnnnnnnnnnnnnnnnnnnnnnnnnnnnnnnnnnnnnnnnnnnnnnnnnnnnnnnnnnnnnnnnnnnnnnnnnnnnnnnnnnnnnnnnnnnnnnnnnnnnnnnnnnnnnnnnnnnnnnnnnnnnnnnnnnnnnnnnnnnnnnnnnnnnnnnnnnnnnnnnnnnnnnnnnnnnnnnnnnnnnnnnnnnnnnnnnnnnnnnnnnnnnnnnnnnnnnnnnnnnnnnnnnnnnnnnnnnnnnnnnnnnnnnnnnnnnnnnnnnnnnnnnnnnnnnnnnnnnnnnnnnnnnnnnnnnnnnnnnnnnnnnnnnnnnnnnnnnnnnnnnnnnnnnnnnnnnnnnnnnnnnnnnnnnnnnnnnnnnnnnnnnnnnnnnnnnnnnnnnnnnnnnnnnnnnnnnnnnnnnnnnnnnnnnnnnnnnnnnnnnnnnnnnnnnnnnnnnnnnnnnnnnnnnnnnnnnnnnnnnnnnnnnnnnnnnnnnnnnnnnnnnnnnnnnnnnnnnnnnnnnnnnnnnnnnnnnnnnnnnnnnnnnnnnnnnnnnnnnnnnnnnnnnnnnnnnnnnnnnnnnnnnnnnnnnnnnnnnnnnnnnnnnnnnnnnnnnnnnnnnnnnnnnnnnnnnnnnnnnnnnnnnnnnnnnnnnnnnnnnnnnnnnnnnnnnnnnnnnnnnnnnnnnnnnnnnnnnnnnnnnnnnnnnnnnnnnnnnnnnnnnnnnnnnnnnnnnnnnnnnnnnnnnnnnnnnnnnnnnnnnnnnnnnnnnnnnnnnnnnnnnnnnnnnnnnnnnnnnnnnnnnnnnnnnnnnnnnnnnnnnnnnnnnnnnnnnnnnnnnnnnnnnnnnnnnnnnnnnnnnnnnnnnnnnnnnnnnnnnnnnnnnnnnnnnnnnnnnnnnnnnnnnnnnnnnnnnnnnnnnnnnnnnnnnnnnnnnnnnnnnnnnnnnnnnnnnnnnnnnnnnnnnnnnnnnnnnnnnnnnnnnnnnnnnnnnnnnnnnnnnnnnnnnnnnnnnnnnnnnnnnnnnnnnnnnnnnnnnnnnnnnnnnnnnnnnnnnnnnnnnnnnnnnnnnnnnnnnnnnnnnnnnnnnnnnnnnnnnnnnnnnnnnnnnnnnnnnnnnnnnnnnnnnnnnnnnnnnnnnnnnnnnnnnnnnnnnnnnnnnnnnnnnnnnnnnnnnnnnnnnnnnnnnnnnnnnnnnnnnnnnnnnnnnnnnnnnnnnnnnnnnnnnnnnnnnnnnnnnnnnnnnnnnnnnnnnnnnnnnnnnnnnnnnnnnnnnnnnnnnnnnnnnnnnnnnnnnnnnnnnnnnnnnnnnnnnnnnnnnnnnnnnnnnnnnnnnnnnnnnnnnnnnnnnnnnnnnnnnnnnnnnnnnnnnnnnnnnnnnnnnnnnnnnnnnnnnnnnnnnnnnnnnnnnnnnnnnnnnnnnnnnnnnnnnnnnnnnnnnnnnnnnnnnnnnnnnnnnnnnnnnnnnnnnnnnnnnnnnnnnnnnnnnnnnnnnnnnnnnnnnnnnnnnnnnnnnnnnnnnnnnnnnnnnnnnnnnnnnnnnnnnnnnnnnnnnnnnnnnnnnnnnnnnnnnnnnnnnnnnnnnnnnnnnnnnnnnnnnnnnnnnnnnnnnnnnnnnnnnnnnnnnnnnnnnnnnnnnnnnnnnnnnnnnnnnnnnnnnnnnnnnnnnnnnnnnnnnnnnnnnnnnnnnnnnnnnnnnnnnnnnnnnnnnnnnnnnnnnnnnnnnnnnnnnnnnnnnnnnnnnnnnnnnnnnnnnnnnnnnnnnnnnnnnnnnnnnnnnnnnnnnnnnnnnnnnnnnnnnnnnnnnnnnnnnnnnnnnnnnnnnnnnnnnnnnnnnnnnnnnnnnnnnnnnnnnnnnnnnnnnnnnnnnnnnnnnnnnnnnnnnnnnnnnnnnnnnnnnnnnnnnnnnnnnnnnnnnnnnnnnnnnnnnnnnnnnnnnnnnnnnnnnnnnnnnnnnnnnnnnnnnnnnnnnnnnnnnnnnnnnnnnnnnnnnnnnnnnnnnnnnnnnnnnnnnnnnnnnnnnnnnnnnnnnnnnnnnnnnnnnnnnnnnnnnnnnnnnnnnnnnnnnnnnnnnnnnnnnnnnnnnnnnnnnnnnnnnnnnnnnnnnnnnnnnnnnnnnnnnnnnnnnnnnnnnnnnnnnnnnnnnnnnnnnnnnnnnnnnnnnnnnnnnnnnnnnnnnnnnnnnnnnnnnnnnnnnnnnnnnnnnnnnnnnnnnnnnnnnnnnnnnnnnnnnnnnnnnnnnnnnnnnnnnnnnnnnnnnnnnnnnnnnnnnnnnnnnnnnnnnnnnnnnnnnnnnnnnnnnnnnnnnnnnnnnnnnnnnnnnnnnnnnnnnnnnnnnnnnnnnnnnnnnnnnnnnnnnnnnnnnnnnnnnnnnnnnnnnnnnnnnnnnnnnnnnnnnnnnnnnnnnnnnnnnnnnnnnnnnnnnnnnnnnnnnnnnnnnnnnnnnnnnnnnnnnnnnnnnnnnnnnnnnnnnnnnnnnnnnnnnnnnnnnnnnnnnnnnnnnnnnnnnnnnnnnnnnnnnnnnnnnnnnnnnnnnnnnnnnnnnnnnnnnnnnnnnnnnnnnnnnnnnnnnnnnnnnnnnnnnnnnnnnnnnnnnnnnnnnnnnnnnnnnnnnnnnnnnnnnnnnnnnnnnnnnnnnnnnnnnnnnnnnnnnnnnnnnnnnnnnnnnnnnnnnnnnnnnnnnnnnnnnnnnnnnnnnnnnnnnnnnnnnnnnnnnnnnnnnnnnnnnnnnnnnnnnnnnnnnnnnnnnnnnnnnnnnnnnnnnnnnnnnnnnnnnnnnnnnnnnnnnnnnnnnnnnnnnnnnnnnnnnnnnnnnnnnnnnnnnnnnnnnnnnnnnnnnnnnnnnnnnnnnnnnnnnnnnnnnnnnnnnnnnnnnnnnnnnnnnnnnnnnnnnnnnnnnnnnnnnnnnnnnnnnnnnnnnnnnnnnnnnnnnnnnnnnnnnnnnnnnnnnnnnnnnnnnnnnnnnnnnnnnnnnnnnnnnnnnnnnnnnnnnnnnnnnnnnnnnnnnnnnnnnnnnnnnnnnnnnnnnnnnnnnnnnnnnnnnnnnnnnnnnnnnnnnnnnnnnnnnnnnnnnnnnnnnnnnnnnnnnnnnnnnnnnnnnnnnnnnnnnnnnnnnnnnnnnnnnnnnnnnnnnnnnnnnnnnnnnnnnnnnnnnnnnnnnnnnnnnnnnnnnnnnnnnnnnnnnnnnnnnnnnnnnnnnnnnnnnnnnnnnnnnnnnnnnnnnnnnnnnnnnnnnnnnnnnnnnnnnnnnnnnnnnnnnnnnnnnnnnnnnnnnnnnnnnnnnnnnnnnnnnnnnnnnnnnnnnnnnnnnnnnnnnnnnnnnnnnnnnnnnnnnnnnnnnnnnnnnnnnnnnnnnnnnnnnnnnnnnnnnnnnnnnnnnnnnnnnnnnnnnnnnnnnnnnnnnnnnnnnnnnnnnnnnnnnnnnnnnnnnnnnnnnnnnnnnnnnnnnnnnnnnnnnnnnnnnnnnnnnnnnnnnnnnnnnnnnnnnnnnnnnnnnnnnnnnnnnnnnnnnnnnnnnnnnnnnnnnnnnnnnnnnnnnnnnnnnnnnnnnnnnnnnnnnnnnnnnnnnnnnnnnnnnnnnnnnnnnnnnnnnnnnnnnnnnnnnnnnnnnnnnnnnnnnnnnnnnnnnnnnnnnnnnnnnnnnnnnnnnnnnnnnnnnnnnnnnnnnnnnnnnnnnnnnnnnnnnnnnnnnnnnnnnnnnnnnnnnnnnnnnnnnnnnnnnnnnnnnnnnnnnnnnnnnnnnnnnnnnnnnnnnnnnnnnnnnnnnnnnnnnnnnnnnnnnnnnnnnnnnnnnnnnnnnnnnnnnnnnnnnnnnnnnnnnnnnnnnnnnnnnnnnnnnnnnnnnnnnnnnnnnnnnnnnnnnnnnnnnnnnnnnnnnnnnnnnnnnnnnnnnnnnnnnnnnnnnnnnnnnnnnnnnnnnnnnnnnnnnnnnnnnnnnnnnnnnnnnnnnnnnnnnnnnnnnnnnnnnnnnnnnnnnnnnnnnnnnnnnnnnnnnnnnnnnnnnnnnnnnnnnnnnnnnnnnnnnnnnnnnnnnnnnnnnnnnnnnnnnnnnnnnnnnnnnnnnnnnnnnnnnnnnnnnnnnnnnnnnnnnnnnnnnnnnnnnnnnnnnnnnnnnnnnnnnnnnnnnnnnnnnnnnnnnnnnnnnnnnnnnnnnnnnnnnnnnnnnnnnnnnnnnnnnnnnnnnnnnnnnnnnnnnnnnnnnnnnnnnnnnnnnnnnnnnnnnnnnnnnnnnnnnnnnnnnnnnnnnnnnnnnnnnnnnnnnnnnnnnnnnnnnnnnnnnnnnnnnnnnnnnnnnnnnnnnnnnnnnnnnnnnnnnnnnnnnnnnnnnnnnnnnnnnnnnnnnnnnnnnnnnnnnnnnnnnnnnnnnnnnnnnnnnnnnnnnnnnnnnnnnnnnnnnnnnnnnnnnnnnnnnnnnnnnnnnnnnnnnnnnnnnnnnnnnnnnnnnnnnnnnnnnnnnnnnnnnnnnnnnnnnnnnnnnnnnnnnnnnnnnnnnnnnnnnnnnnnnnnnnnnnnnnnnnnnnnnnnnnnnnnnnnnnnnnnnnnnnnnnnnnnnnnnnnnnnnnnnnnnnnnnnnnnnnnnnnnnnnnnnnnnnnnnnnnnnnnnnnnnnnnnnnnnnnnnnnnnnnnnnnnnnnnnnnnnnnnnnnnnnnnnnnnnnnnnnnnnnnnnnnnnnnnnnnnnnnnnnnnnnnnnnnnnnnnnnnnnnnnnnnnnnnnnnnnnnnnnnnnnnnnnnnnnnnnnnnnnnnnnnnnnnnnnnnnnnnnnnnnnnnnnnnnnnnnnnnnnnnnnnnnnnnnnnnnnnnnnnnnnnnnnnnnnnnnnnnnnnnnnnnnnnnnnnnnnnnnnnnnnnnnnnnnnnnnnnnnnnnnnnnnnnnnnnnnnnnnnnnnnnnnnnnnnnnnnnnnnnnnnnnnnnnnnnnnnnnnnnnnnnnnnnnnnnnnnnnnnnnnnnnnnnnnnnnnnnnnnnnnnnnnnnnnnnnnnnnnnnnnnnnnnnnnnnnnnnnnnnnnnnnnnnnnnnnnnnnnnnnnnnnnnnnnnnnnnnnnnnnnnnnnnnnnnnnnnnnnnnnnnnnnnnnnnnnnnnnnnnnnnnnnnnnnnnnnnnnnnnnnnnnnnnnnnnnnnnnnnnnnnnnnnnnnnnnnnnnnnnnnnnnnnnnnnnnnnnnnnnnnnnnnnnnnnnnnnnnnnnnnnnnnnnnnnnnnnnnnnnnnnnnnnnnnnnnnnnnnnnnnnnnnnnnnnnnnnnnnnnnnnnnnnnnnnnnnnnnnnnnnnnnnnnnnnnnnnnnnnnnnnnnnnnnnnnnnnnnnnnnnnnnnnnnnnnnnnnnnnnnnnnnnnnnnnnnnnnnnnnnnnnnnnnnnnnnnnnnnnnnnnnnnnnnnnnnnnnnnnnnnnnnnnnnnnnnnnnnnnnnnnnnnnnnnnnnnnnnnnnnnnnnnnnnnnnnnnnnnnnnnnnnnnnnnnnnnnnnnnnnnnnnnnnnnnnnnnnnnnnnnnnnnnnnnnnnnnnnnnnnnnnnnnnnnnnnnnnnnnnnnnnnnnnnnnnnnnnnnnnnnnnnnnnnnnnnnnnnnnnnnnnnnnnnnnnnnnnnnnnnnnnnnnnnnnnnnnnnnnnnnnnnnnnnnnnnnnnnnnnnnnnnnnnnnnnnnnnnnnnnnnnnnnnnnnnnnnnnnnnnnnnnnnnnnnnnnnnnnnnnnnnnnnnnnnnnnnnnnnnnnnnnnnnnnnnnnnnnnnnnnnnnnnnnnnnnnnnnnnnnnnnnnnnnnnnnnnnnnnnnnnnnnnnnnnnnnnnnnnnnnnnnnnnnnnnnnnnnnnnnnnnnnnnnnnnnnnnnnnnnnnnnnnnnnnnnnnnnnnnnnnnnnnnnnnnnnnnnnnnnnnnnnnnnnnnnnnnnnnnnnnnnnnnnnnnnnnnnnnnnnnnnnnnnnnnnnnnnnnnnnnnnnnnnnnnnnnnnnnnnnnnnnnnnnnnnnnnnnnnnnnnnnnnnnnnnnnnnnnnnnnnnnnnnnnnnnnnnnnnnnnnnnnnnnnnnnnnnnnnnnnnnnnnnnnnnnnnnnnnnnnnnnnnnnnnnnnnnnnnnnnnnnnnnnnnnnnnnnnnnnnnnnnnnnnnnnnnnnnnnnnnnnnnnnnnnnnnnnnnnnnnnnnnnnnnnnnnnnnnnnnnnnnnnnnnnnnnnnnnnnnnnnnnnnnnnnnnnnnnnnnnnnnnnnnnnnnnnnnnnnnnnnnnnnnnnnnnnnnnnnnnnnnnnnnnnnnnnnnnnnnnnnnnnnnnnnnnnnnnnnnnnnnnnnnnnnnnnnnnnnnnnnnnnnnnnnnnnnnnnnnnnnnnnnnnnnnnnnnnnnnnnnnnnnnnnnnnnnnnnnnnnnnnnnnnnnnnnnnnnnnnnnnnnnnnnnnnnnnnnnnnnnnnnnnnnnnnnnnnnnnnnnnnnnnnnnnnnnnnnnnnnnnnnnnnnnnnnnnnnnnnnnnnnnnnnnnnnnnnnnnnnnnnnnnnnnnnnnnnnnnnnnnnnnnnnnnnnnnnnnnnnnnnnnnnnnnnnnnnnnnnnnnnnnnnnnnnnnnnnnnnnnnnnnnnnnnnnnnnnnnnnnnnnnnnnnnnnnnnnnnnnnnnnnnnnnnnnnnnnnnnnnnnnnnnnnnnnnnnnnnnnnnnnnnnnnnnnnnnnnnnnnnnnnnnnnnnnnnnnnnnnnnnnnnnnnnnnnnnnnnnnnnnnnnnnnnnnnnnnnnnnnnnnnnnnnnnnnnnnnnnnnnnnnnnnnnnnnnnnnnnnnnnnnnnnnnnnnnnnnnnnnnnnnnnnnnnnnnnnnnnnnnnnnnnnnnnnnnnnnnnnnnnnnnnnnnnnnnnnnnnnnnnnnnnnnnnnnnnnnnnnnnnnnnnnnnnnnnnnnnnnnnnnnnnnnnnnnnnnnnnnnnnnnnnnnnnnnnnnnnnnnnnnnnnnnnnnnnnnnnnnnnnnnnnnnnnnnnnnnnnnnnnnnnnnnnnnnnnnnnnnnnnnnnnnnnnnnnnnnnnnnnnnnnnnnnnnnnnnnnnnnnnnnnnnnnnnnnnnnnnnnnnnnnnnnnnnnnnnnnnnnnnnnnnnnnnnnnnnnnnnnnnnnnnnnnnnnnnnnnnnnnnnnnnnnnnnnnnnnnnnnnnnnnnnnnnnnnnnnnnnnnnnnnnnnnnnnnnnnnnnnnnnnnnnnnnnnnnnnnnnnnnnnnnnnnnnnnnnnnnnnnnnnnnnnnnnnnnnnnnnnnnnnnnnnnnnnnnnnnnnnnnnnnnnnnnnnnnnnnnnnnnnnnnnnnnnnnnnnnnnnnnnnnnnnnnnnnnnnnnnnnnnnnnnnnnnnnnnnnnnnnnnnnnnnnnnnnnnnnnnnnnnnnnnnnnnnnnnnnnnnnnnnnnnnnnnnnnnnnnnnnnnnnnnnnnnnnnnnnnnnnnnnnnnnnnnnnnnnnnnnnnnnnnnnnnnnnnnnnnnnnnnnnnnnnnnnnnnnnnnnnnnnnnnnnnnnnnnnnnnnnnnnnnnnnnnnnnnnnnnnnnnnnnnnnnnnnnnnnnnnnnnnnnnnnnnnnnnnnnnnnnnnnnnnnnnnnnnnnnnnnnnnnnnnnnnnnnnnnnnnnnnnnnnnnnnnnnnnnnnnnnnnnnnnnnnnnnnnnnnnnnnnnnnnnnnnnnnnnnnnnnnnnnnnnnnnnnnnnnnnnnnnnnnnnnnnnnnnnnnnnnnnnnnnnnnnnnnnnnnnnnnnnnnnnnnnnnnnnnnnnnnnnnnnnnnnnnnnnnnnnnnnnnnnnnnnnnnnnnnnnnnnnnnnnnnnnnnnnnnnnnnnnnnnnnnnnnnnnnnnnnnnnnnnnnnnnnnnnnnnnnnnnnnnnnnnnnnnnnnnnnnnnnnnnnnnnnnnnnnnnnnnnnnnnnnnnnnnnnnnnnnnnnnnnnnnnnnnnnnnnnnnnnnnnnnnnnnnnnnnnnnnnnnnnnnnnnnnnnnnnnnnnnnnnnnnnnnnnnnnnnnnnnnnnnnnnnnnnnnnnnnnnnnnnnnnnnnnnnnnnnnnnnnnnnnnnnnnnnnnnnnnnnnnnnnnnnnnnnnnnnnnnnnnnnnnnnnnnnnnnnnnnnnnnnnnnnnnnnnnnnnnnnnnnnnnnnnnnnnnnnnnnnnnnnnnnnnnnnnnnnnnnnnnnnnnnnnnnnnnnnnnnnnnnnnnnnnnnnnnnnnnnnnnnnnnnnnnnnnnnnnnnnnnnnnnnnnnnnnnnnnnnnnnnnnnnnnnnnnnnnnnnnnnnnnnnnnnnnnnnnnnnnnnnnnnnnnnnnnnnnnnnnnnnnnnnnnnnnnnnnnnnnnnnnnnnnnnnnnnnnnnnnnnnnnnnnnnnnnnnnnnnnnnnnnnnnnnnnnnnnnnnnnnnnnnnnnnnnnnnnnnnnnnnnnnnnnnnnnnnnnnnnnnnnnnnnnnnnnnnnnnnnnnnnnnnnnnnnnnnnnnnnnnnnnnnnnnnnnnnnnnnnnnnnnnnnnnnnnnnnnnnnnnnnnnnnnnnnnnnnnnnnnnnnnnnnnnnnnnnnnnnnnnnnnnnnnnnnnnnnnnnnnnnnnnnnnnnnnnnnnnnnnnnnnnnnnnnnnnnnnnnnnnnnnnnnnnnnnnnnnnnnnnnnnnnnnnnnnnnnnnnnnnnnnnnnnnnnnnnnnnnnnnnnnnnnnnnnnnnnnnnnnnnnnnnnnnnnnnnnnnnnnnnnnnnnnnnnnnnnnnnnnnnnnnnnnnnnnnnnnnnnnnnnnnnnnnnnnnnnnnnnnnnnnnnnnnnnnnnnnnnnnnnnnnnnnnnnnnnnnnnnnnnnnnnnnnnnnnnnnnnnnnnnnnnnnnnnnnnnnnnnnnnnnnnnnnnnnnnnnnnnnnnnnnnnnnnnnnnnnnnnnnnnnnnnnnnnnnnnnnnnnnnnnnnnnnnnnnnnnnnnnnnnnnnnnnnnnnnnnnnnnnnnnnnnnnnnnnnnnnnnnnnnnnnnnnnnnnnnnnnnnnnnnnnnnnnnnnnnnnnnnnnnnnnnnnnnnnnnnnnnnnnnnnnnnnnnnnnnnnnnnnnnnnnnnnnnnnnnnnnnnnnnnnnnnnnnnnnnnnnnnnnnnnnnnnnnnnnnnnnnnnnnnnnnnnnnnnnnnnnnnnnnnnnnnnnnnnnnnnnnnnnnnnnnnnnnnnnnnnnnnnnnnnnnnnnnnnnnnnnnnnnnnnnnnnnnnnnnnnnnnnnnnnnnnnnnnnnnnnnnnnnnnnnnnnnnnnnnnnnnnnnnnnnnnnnnnnnnnnnnnnnnnnnnnnnnnnnnnnnnnnnnnnnnnnnnnnnnnnnnnnnnnnnnnnnnnnnnnnnnnnnnnnnnnnnnnnnnnnnnnnnnnnnnnnnnnnnnnnnnnnnnnnnnnnnnnnnnnnnnnnnnnnnnnnnnnnnnnnnnnnnnnnnnnnnnnnnnnnnnnnnnnnnnnnnnnnnnnnnnnnnnnnnnnnnnnnnnnnnnnnnnnnnnnnnnnnnnnnnnnnnnnnnnnnnnnnnnnnnnnnnnnnnnnnnnnnnnnnnnnnnnnnnnnnnnnnnnnnnnnnnnnnnnnnnnnnnnnnnnnnnnnnnnnnnnnnnnnnnnnnnnnnnnnnnnnnnnnnnnnnnnnnnnnnnnnnnnnnnnnnnnnnnnnnnnnnnnnnnnnnnnnnnnnnnnnnnnnnnnnnnnnnnnnnnnnnnnnnnnnnnnnnnnnnnnnnnnnnnnnnnnnnnnnnnnnnnnnnnnnnnnnnnnnnnnnnnnnnnnnnnnnnnnnnnnnnnnnnnnnnnnnnnnnnnnnnnnnnnnnnnnnnnnnnnnnnnnnnnnnnnnnnnnnnnnnnnnnnnnnnnnnnnnnnnnnnnnnnnnnnnnnnnnnnnnnnnnnnnnnnnnnnnnnnnnnnnnnnnnnnnnnnnnnnnnnnnnnnnnnnnnnnnnnnnnnnnnnnnnnnnnnnnnnnnnnnnnnnnnnnnnnnnnnnnnnnnnnnnnnnnnnnnnnnnnnnnnnnnnnnnnnnnnnnnnnnnnnnnnnnnnnnnnnnnnnnnnnnnnnnnnnnnnnnnnnnnnnnnnnnnnnnnnnnnnnnnnnnnnnnnnnnnnnnnnnnnnnnnnnnnnnnnnnnnnnnnnnnnnnnnnnnnnnnnnnnnnnnnnnnnnnnnnnnnnnnnnnnnnnnnnnnnnnnnnnnnnnnnnnnnnnnnnnnnnnnnnnnnnnnnnnnnnnnnnnnnnnnnnnnnnnnnnnnnnnnnnnnnnnnnnnnnnnnnnnnnnnnnnnnnnnnnnnnnnnnnnnnnnnnnnnnnnnnnnnnnnnnnnnnnnnnnnnnnnnnnnnnnnnnnnnnnnnnnnnnnnnnnnnnnnnnnnnnnnnnnnnnnnnnnnnnnnnnnnnnnnnnnnnnnnnnnnnnnnnnnnnnnnnnnnnnnnnnnnnnnnnnnnnnnnnnnnnnnnnnnnnnnnnnnnnnnnnnnnnnnnnnnnnnnnnnnnnnnnnnnnnnnnnnnnnnnnnnnnnnnnnnnnnnnnnnnnnnnnnnnnnnnnnnnnnnnnnnnnnnnnnnnnnnnnnnnnnnnnnnnnnnnnnnnnnnnnnnnnnnnnnnnnnnnnnnnnnnnnnnnnnnnnnnnnnnnnnnnnnnnnnnnnnnnnnnnnnnnnnnnnnnnnnnnnnnnnnnnnnnnnnnnnnnnnnnnnnnnnnnnnnnnnnnnnnnnnnnnnnnnnnnnnnnnnnnnnnnnnnnnnnnnnnnnnnnnnnnnnnnnnnnnnnnnnnnnnnnnnnnnnnnnnnnnnnnnnnnnnnnnnnnnnnnnnnnnnnnnnnnnnnnnnnnnnnnnnnnnnnnnnnnnnnnnnnnnnnnnnnnnnnnnnnnnnnnnnnnnnnnnnnnnnnnnnnnnnnnnnnnnnnnnnnnnnnnnnnnnnnnnnnnnnnnnnnnnnnnnnnnnnnnnnnnnnnnnnnnnnnnnnnnnnnnnnnnnnnnnnnnnnnnnnnnnnnnnnnnnnnnnnnnnnnnnnnnnnnnnnnnnnnnnnnnnnnnnnnnnnnnnnnnnnnnnnnnnnnnnnnnnnnnnnnnnnnnnnnnnnnnnnnnnnnnnnnnnnnnnnnnnnnnnnnnnnnnnnnnnnnnnnnnnnnnnnnnnnnnnnnnnnnnnnnnnnnnnnnnnnnnnnnnnnnnnnnnnnnnnnnnnnnnnnnnnnnnnnnnnnnnnnnnnnnnnnnnnnnnnnnnnnnnnnnnnnnnnnnnnnnnnnnnnnnnnnnnnnnnnnnnnnnnnnnnnnnnnnnnnnnnnnnnnnnnnnnnnnnnnnnnnnnnnnnnnnnnnnnnnnnnnnnnnnnnnnnnnnnnnnnnnnnnnnnnnnnnnnnnnnnnnnnnnnnnnnnnnnnnnnnnnnnnnnnnnnnnnnnnnnnnnnnnnnnnnnnnnnnnnnnnnnnnnnnnnnnnnnnnnnnnnnnnnnnnnnnnnnnnnnnnnnnnnnnnnnnnnnnnnnnnnnnnnnnnnnnnnnnnnnnnnnnnnnnnnnnnnnnnnnnnnnnnnnnnnnnnnnnnnnnnnnnnnnnnnnnnnnnnnnnnnnnnnnnnnnnnnnnnnnnnnnnnnnnnnnnnnnnnnnnnnnnnnnnnnnnnnnnnnnnnnnnnnnnnnnnnnnnnnnnnnnnnnnnnnnnnnnnnnnnnnnnnnnnnnnnnnnnnnnnnnnnnnnnnnnnnnnnnnnnnnnnnnnnnnnnnnnnnnnnnnnnnnnnnnnnnnnnnnnnnnnnnnnnnnnnnnnnnnnnnnnnnnnnnnnnnnnnnnnnnnnnnnnnnnnnnnnnnnnnnnnnnnnnnnnnnnnnnnnnnnnnnnnnnnnnnnnnnnnnnnnnnnnnnnnnnnnnnnnnnnnnnnnnnnnnnnnnnnnnnnnnnnnnnnnnnnnnnnnnnnnnnnnnnnnnnnnnnnnnnnnnnnnnnnnnnnnnnnnnnnnnnnnnnnnnnnnnnnnnnnnnnnnnnnnnnnnnnnnnnnnnnnnnnnnnnnnnnnnnnnnnnnnnnnnnnnnnnnnnnnnnnnnnnnnnnnnnnnnnnnnnnnnnnnnnnnnnnnnnnnnnnnnnnnnnnnnnnnnnnnnnnnnnnnnnnnnnnnnnnnnnnnnnnnnnnnnnnnnnnnnnnnnnnnnnnnnnnnnnnnnnnnnnnnnnnnnnnnnnnnnnnnnnnnnnnnnnnnnnnnnnnnnnnnnnnnnnnnnnnnnnnnnnnnnnnnnnnnnnnnnnnnnnnnnnnnnnnnnnnnnnnnnnnnnnnnnnnnnnnnnnnnnnnnnnnnnnnnnnnnnnnnnnnnnnnnnnnnnnnnnnnnnnnnnnnnnnnnnnnnnnnnnnnnnnnnnnnnnnnnnnnnnnnnnnnnnnnnnnnnnnnnnnnnnnnnnnnnnnnnnnnnnnnnnnnnnnnnnnnnnnnnnnnnnnnnnnnnnnnnnnnnnnnnnnnnnnnnnnnnnnnnnnnnnnnnnnnnnnnnnnnnnnnnnnnnnnnnnnnnnnnnnnnnnnnnnnnnnnnnnnnnnnnnnnnnnnnnnnnnnnnnnnnnnnnnnnnnnnnnnnnnnnnnnnnnnnnnnnnnnnnnnnnnnnnnnnnnnnnnnnnnnnnnnnnnnnnnnnnnnnnnnnnnnnnnnnnnnnnnnnnnnnnnnnnnnnnnnnnnnnnnnnnnnnnnnnnnnnnnnnnnnnnnnnnnnnnnnnnnnnnnnnnnnnnnnnnnnnnnnnnnnnnnnnnnnnnnnnnnnnnnnnnnnnnnnnnnnnnnnnnnnnnnnnnnnnnnnnnnnnnnnnnnnnnnnnnnnnnnnnnnnnnnnnnnnnnnnnnnnnnnnnnnnnnnnnnnnnnnnnnnnnnnnnnnnnnnnnnnnnnnnnnnnnnnnnnnnnnnnnnnnnnnnnnnnnnnnnnnnnnnnnnnnnnnnnnnnnnnnnnnnnnnnnnnnnnnnnnnnnnnnnnnnnnnnnnnnnnnnnnnnnnnnnnnnnnnnnnnnnnnnnnnnnnnnnnnnnnnnnnnnnnnnnnnnnnnnnnnnnnnnnnnnnnnnnnnnnnnnnnnnnnnnnnnnnnnnnnnnnnnnnnnnnnnnnnnnnnnnnnnnnnnnnnnnnnnnnnnnnnnnnnnnnnnnnnnnnnnnnnnnnnnnnnnnnnnnnnnnnnnnnnnnnnnnnnnnnnnnnnnnnnnnnnnnnnnnnnnnnnnnnnnnnnnnnnnnnnnnnnnnnnnnnnnnnnnnnnnnnnnnnnnnnnnnnnnnnnnnnnnnnnnnnnnnnnnnnnnnnnnnnnnnnnnnnnnnnnnnnnnnnnnnnnnnnnnnnnnnnnnnnnnnnnnnnnnnnnnnnnnnnnnnnnnnnnnnnnnnnnnnnnnnnnnnnnnnnnnnnnnnnnnnnnnnnnnnnnnnnnnnnnnnnnnnnnnnnnnnnnnnnnnnnnnnnnnnnnnnnnnnnnnnnnnnnnnnnnnnnnnnnnnnnnnnnnnnnnnnnnnnnnnnnnnnnnnnnnnnnnnnnnnnnnnnnnnnnnnnnnnnnnnnnnnnnnnnnnnnnnnnnnnnnnnnnnnnnnnnnnnnnnnnnnnnnnnnnnnnnnnnnnnnnnnnnnnnnnnnnnnnnnnnnnnnnnnnnnnnnnnnnnnnnnnnnnnnnnnnnnnnnnnnnnnnnnnnnnnnnnnnnnnnnnnnnnnnnnnnnnnnnnnnnnnnnnnnnnnnnnnnnnnnnnnnnnnnnnnnnnnnnnnnnnnnnnnnnnnnnnnnnnnnnnnnnnnnnnnnnnnnnnnnnnnnnnnnnnnnnnnnnnnnnnnnnnnnnnnnnnnnnnnnnnnnnnnnnnnnnnnnnnnnnnnnnnnnnnnnnnnnnnnnnnnnnnnnnnnnnnnnnnnnnnnnnnnnnnnnnnnnnnnnnnnnnnnnnnnnnnnnnnnnnnnnnnnnnnnnnnnnnnnnnnnnnnnnnnnnnnnnnnnnnnnnnnnnnnnnnnnnnnnnnnnnnnnnnnnnnnnnnnnnnnnnnnnnnnnnnnnnnnnnnnnnnnnnnnnnnnnnnnnnnnnnnnnnnnnnnnnnnnnnnnnnnnnnnnnnnnnnnnnnnnnnnnnnnnnnnnnnnnnnnnnnnnnnnnnnnnnnnnnnnnnnnnnnnnnnnnnnnnnnnnnnnnnnnnnnnnnnnnnnnnnnnnnnnnnnnnnnnnnnnnnnnnnnnnnnnnnnnnnnnnnnnnnnnnnnnnnnnnnnnnnnnnnnnnnnnnnnnnnnnnnnnnnnnnnnnnnnnnnnnnnnnnnnnnnnnnnnnnnnnnnnnnnnnnnnnnnnnnnnnnnnnnnnnnnnnnnnnnnnnnnnnnnnnnnnnnnnnnnnnnnnnnnnnnnnnnnnnnnnnnnnnnnnnnnnnnnnnnnnnnnnnnnnnnnnnnnnnnnnnnnnnnnnnnnnnnnnnnnnnnnnnnnnnnnnnnnnnnnnnnnnnnnnnnnnnnnnnnnnnnnnnnnnnnnnnnnnnnnnnnnnnnnnnnnnnnnnnnnnnnnnnnnnnnnnnnnnnnnnnnnnnnnnnnnnnnnnnnnnnnnnnnnnnnnnnnnnnnnnnnnnnnnnnnnnnnnnnnnnnnnnnnnnnnnnnnnnnnnnnnnnnnnnnnnnnnnnnnnnnnnnnnnnnnnnnnnnnnnnnnnnnnnnnnnnnnnnnnnnnnnnnnnnnnnnnnnnnnnnnnnnnnnnnnnnnnnnnnnnnnnnnnnnnnnnnnnnnnnnnnnnnnnnnnnnnnnnnnnnnnnnnnnnnnnnnnnnnnnnnnnnnnnnnnnnnnnnnnnnnnnnnnnnnnnnnnnnnnnnnnnnnnnnnnnnnnnnnnnnnnnnnnnnnnnnnnnnnnnnnnnnnnnnnnnnnnnnnnnnnnnnnnnnnnnnnnnnnnnnnnnnnnnnnnnnnnnnnnnnnnnnnnnnnnnnnnnnnnnnnnnnnnnnnnnnnnnnnnnnnnnnnnnnnnnnnnnnnnnnnnnnnnnnnnnnnnnnnnnnnnnnnnnnnnnnnnnnnnnnnnnnnnnnnnnnnnnnnnnnnnnnnnnnnnnnnnnnnnnnnnnnnnnnnnnnnnnnnnnnnnnnnnnnnnnnnnnnnnnnnnnnnnnnnnnnnnnnnnnnnnnnnnnnnnnnnnnnnnnnnnnnnnnnnnnnnnnnnnnnnnnnnnnnnnnnnnnnnnnnnnnnnnnnnnnnnnnnnnnnnnnnnnnnnnnnnnnnnnnnnnnnnnnnnnnnnnnnnnnnnnnnnnnnnnnnnnnnnnnnnnnnnnnnnnnnnnnnnnnnnnnnnnnnnnnnnnnnnnnnnnnnnnnnnnnnnnnnnnnnnnnnnnnnnnnnnnnnnnnnnnnnnnnnnnnnnnnnnnnnnnnnnnnnnnnnnnnnnnnnnnnnnnnnnnnnnnnnnnnnnnnnnnnnnnnnnnnnnnnnnnnnnnnnnnnnnnnnnnnnnnnnnnnnnnnnnnnnnnnnnnnnnnnnnnnnnnnnnnnnnnnnnnnnnnnnnnnnnnnnnnnnnnnnnnnnnnnnnnnnnnnnnnnnnnnnnnnnnnnnnnnnnnnnnnnnnnnnnnnnnnnnnnnnnnnnnnnnnnnnnnnnnnnnnnnnnnnnnnnnnnnnnnnnnnnnnnnnnnnnnnnnnnnnnnnnnnnnnnnnnnnnnnnnnnnnnnnnnnnnnnnnnnnnnnnnnnnnnnnnnnnnnnnnnnnnnnnnnnnnnnnnnnnnnnnnnnnnnnnnnnnnnnnnnnnnnnnnnnnnnnnnnnnnnnnnnnnnnnnnnnnnnnnnnnnnnnnnnnnnnnnnnnnnnnnnnnnnnnnnnnnnnnnnnnnnnnnnnnnnnnnnnnnnnnnnnnnnnnnnnnnnnnnnnnnnnnnnnnnnnnnnnnnnnnnnnnnnnnnnnnnnnnnnnnnnnnnnnnnnnnnnnnnnnnnnnnnnnnnnnnnnnnnnnnnnnnnnnnnnnnnnnnnnnnnnnnnnnnnnnnnnnnnnnnnnnnnnnnnnnnnnnnnnnnnnnnnnnnnnnnnnnnnnnnnnnnnnnnnnnnnnnnnnnnnnnnnnnnnnnnnnnnnnnnnnnnnnnnnnnnnnnnnnnnnnnnnnnnnnnnnnnnnnnnnnnnnnnnnnnnnnnnnnnnnnnnnnnnnnnnnnnnnnnnnnnnnnnnnnnnnnnnnnnnnnnnnnnnnnnnnnnnnnnnnnnnnnnnnnnnnnnnnnnnnnnnnnnnnnnnnnnnnnnnnnnnnnnnnnnnnnnnnnnnnnnnnnnnnnnnnnnnnnnnnnnnnnnnnnnnnnnnnnnnnnnnnnnnnnnnnnnnnnnnnnnnnnnnnnnnnnnnnnnnnnnnnnnnnnnnnnnnnnnnnnnnnnnnnnnnnnnnnnnnnnnnnnnnnnnnnnnnnnnnnnnnnnnnnnnnnnnnnnnnnnnnnnnnnnnnnnnnnnnnnnnnnnnnnnnnnnnnnnnnnnnnnnnnnnnnnnnnnnnnnnnnnnnnnnnnnnnnnnnnnnnnnnnnnnnnnnnnnnnnnnnnnnnnnnnnnnnnnnnnnnnnnnnnnnnnnnnnnnnnnnnnnnnnnnnnnnnnnnnnnnnnnnnnnnnnnnnnnnnnnnnnnnnnnnnnnnnnnnnnnnnnnnnnnnnnnnnnnnnnnnnnnnnnnnnnnnnnnnnnnnnnnnnnnnnnnnnnnnnnnnnnnnnnnnnnnnnnnnnnnnnnnnnnnnnnnnnnnnnnnnnnnnnnnnnnnnnnnnnnnnnnnnnnnnnnnnnnnnnnnnnnnnnnnnnnnnnnnnnnnnnnnnnnnnnnnnnnnnnnnnnnnnnnnnnnnnnnnnnnnnnnnnnnnnnnnnnnnnnnnnnnnnnnnnnnnnnnnnnnnnnnnnnnnnnnnnnnnnnnnnnnnnnnnnnnnnnnnnnnnnnnnnnnnnnnnnnnnnnnnnnnnnnnnnnnnnnnnnnnnnnnnnnnnnnnnnnnnnnnnnnnnnnnnnnnnnnnnnnnnnnnnnnnnnnnnnnnnnnnnnnnnnnnnnnnnnnnnnnnnnnnnnnnnnnnnnnnnnnnnnnnnnnnnnnnnnnnnnnnnnnnnnnnnnnnnnnnnnnnnnnnnnnnnnnnnnnnnnnnnnnnnnnnnnnnnnnnnnnnnnnnnnnnnnnnnnnnnnnnnnnnnnnnnnnnnnnnnnnnnnnnnnnnnnnnnnnnnnnnnnnnnnnnnnnnnnnnnnnnnnnnnnnnnnnnnnnnnnnnnnnnnnnnnnnnnnnnnnnnnnnnnnnnnnnnnnnnnnnnnnnnnnnnnnnnnnnnnnnnnnnnnnnnnnnnnnnnnnnnnnnnnnnnnnnnnnnnnnnnnnnnnnnnnnnnnnnnnnnnnnnnnnnnnnnnnnnnnnnnnnnnnnnnnnnnnnnnnnnnnnnnnnnnnnnnnnnnnnnnnnnnnnnnnnnnnnnnnnnnnnnnnnnnnnnnnnnnnnnnnnnnnnnnnnnnnnnnnnnnnnnnnnnnnnnnnnnnnnnnnnnnnnnnnnnnnnnnnnnnnnnnnnnnnnnnnnnnnnnnnnnnnnnnnnnnnnnnnnnnnnnnnnnnnnnnnnnnnnnnnnnnnnnnnnnnnnnnnnnnnnnnnnnnnnnnnnnnnnnnnnnnnnnnnnnnnnnnnnnnnnnnnnnnnnnnnnnnnnnnnnnnnnnnnnnnnnnnnnnnnnnnnnnnnnnnnnnnnnnnnnnnnnnnnnnnnnnnnnnnnnnnnnnnnnnnnnnnnnnnnnnnnnnnnnnnnnnnnnnnnnnnnnnnnnnnnnnnnnnnnnnnnnnnnnnnnnnnnnnnnnnnnnnnnnnnnnnnnnnnnnnnnnnnnnnnnnnnnnnnnnnnnnnnnnnnnnnnnnnnnnnnnnnnnnnnnnnnnnnnnnnnnnnnnnnnnnnnnnnnnnnnnnnnnnnnnnnnnnnnnnnnnnnnnnnnnnnnnnnnnnnnnnnnnnnnnnnnnnnnnnnnnnnnnnnnnnnnnnnnnnnnnnnnnnnnnnnnnnnnnnnnnnnnnnnnnnnnnnnnnnnnnnnnnnnnnnnnnnnnnnnnnnnnnnnnnnnnnnnnnnnnnnnnnnnnnnnnnnnnnnnnnnnnnnnnnnnnnnnnnnnnnnnnnnnnnnnnnnnnnnnnnnnnnnnnnnnnnnnnnnnnnnnnnnnnnnnnnnnnnnnnnnnnnnnnnnnnnnnnnnnnnnnnnnnnnnnnnnnnnnnnnnnnnnnnnnnnnnnnnnnnnnnnnnnnnnnnnnnnnnnnnnnnnnnnnnnnnnnnnnnnnnnnnnnnnnnnnnnnnnnnnnnnnnnnnnnnnnnnnnnnnnnnnnnnnnnnnnnnnnnnnnnnnnnnnnnnnnnnnnnnnnnnnnnnnnnnnnnnnnnnnnnnnnnnnnnnnnnnnnnnnnnnnnnnnnnnnnnnnnnnnnnnnnnnnnnnnnnnnnnnnnnnnnnnnnnnnnnnnnnnnnnnnnnnnnnnnnnnnnnnnnnnnnnnnnnnnnnnnnnnnnnnnnnnnnnnnnnnnnnnnnnnnnnnnnnnnnnnnnnnnnnnnnnnnnnnnnnnnnnnnnnnnnnnnnnnnnnnnnnnnnnnnnnnnnnnnnnnnnnnnnnnnnnnnnnnnnnnnnnnnnnnnnnnnnnnnnnnnnnnnnnnnnnnnnnnnnnnnnnnnnnnnnnnnnnnnnnnnnnnnnnnnnnnnnnnnnnnnnnnnnnnnnnnnnnnnnnnnnnnnnnnnnnnnnnnnnnnnnnnnnnnnnnnnnnnnnnnnnnnnnnnnnnnnnnnnnnnnnnnnnnnnnnnnnnnnnnnnnnnnnnnnnnnnnnnnnnnnnnnnnnnnnnnnnnnnnnnnnnnnnnnnnnnnnnnnnnnnnnnnnnnnnnnnnnnnnnnnnnnnnnnnnnnnnnnnnnnnnnnnnnnnnnnnnnnnnnnnnnnnnnnnnnnnnnnnnnnnnnnnnnnnnnnnnnnnnnnnnnnnnnnnnnnnnnnnnnnnnnnnnnnnnnnnnnnnnnnnnnnnnnnnnnnnnnnnnnnnnnnnnnnnnnnnnnnnnnnnnnnnnnnnnnnnnnnnnnnnnnnnnnnnnnnnnnnnnnnnnnnnnnnnnnnnnnnnnnnnnnnnnnnnnnnnnnnnnnnnnnnnnnnnnnnnnnnnnnnnnnnnnnnnnnnnnnnnnnnnnnnnnnnnnnnnnnnnnnnnnnnnnnnnnnnnnnnnnnnnnnnnnnnnnnnnnnnnnnnnnnnnnnnnnnnnnnnnnnnnnnnnnnnnnnnnnnnnnnnnnnnnnnnnnnnnnnnnnnnnnnnnnnnnnnnnnnnnnnnnnnnnnnnnnnnnnnnnnnnnnnnnnnnnnnnnnnnnnnnnnnnnnnnnnnnnnnnnnnnnnnnnnnnnnnnnnnnnnnnnnnnnnnnnnnnnnnnnnnnnnnnnnnnnnnnnnnnnnnnnnnnnnnnnnnnnnnnnnnnnnnnnnnnnnnnnnnnnnnnnnnnnnnnnnnnnnnnnnnnnnnnnnnnnnnnnnnnnnnnnnnnnnnnnnnnnnnnnnnnnnnnnnnnnnnnnnnnnnnnnnnnnnnnnnnnnnnnnnnnnnnnnnnnnnnnnnnnnnnnnnnnnnnnnnnnnnnnnnnnnnnnnnnnnnnnnnnnnnnnnnnnnnnnnnnnnnnnnnnnnnnnnnnnnnnnnnnnnnnnnnnnnnnnnnnnnnnnnnnnnnnnnnnnnnnnnnnnnnnnnnnnnnnnnnnnnnnnnnnnnnnnnnnnnnnnnnnnnnnnnnnnnnnnnnnnnnnnnnnnnnnnnnnnnnnnnnnnnnnnnnnnnnnnnnnnnnnnnnnnnnnnnnnnnnnnnnnnnnnnnnnnnnnnnnnnnnnnnnnnnnnnnnnnnnnnnnnnnnnnnnnnnnnnnnnnnnnnnnnnnnnnnnnnnnnnnnnnnnnnnnnnnnnnnnnnnnnnnnnnnnnnnnnnnnnnnnnnnnnnnnnnnnnnnnnnnnnnnnnnnnnnnnnnnnnnnnnnnnnnnnnnnnnnnnnnnnnnnnnnnnnnnnnnnnnnnnnnnnnnnnnnnnnnnnnnnnnnnnnnnnnnnnnnnnnnnnnnnnnnnnnnnnnnnnnnnnnnnnnnnnnnnnnnnnnnnnnnnnnnnnnnnnnnnnnnnnnnnnnnnnnnnnnnnnnnnnnnnnnnnnnnnnnnnnnnnnnnnnnnnnnnnnnnnnnnnnnnnnnnnnnnnnnnnnnnnnnnnnnnnnnnnnnnnnnnnnnnnnnnnnnnnnnnnnnnnnnnnnnnnnnnnnnnnnnnnnnnnnnnnnnnnnnnnnnnnnnnnnnnnnnnnnnnnnnnnnnnnnnnnnnnnnnnnnnnnnnnnnnnnnnnnnnnnnnnnnnnnnnnnnnnnnnnnnnnnnnnnnnnnnnnnnnnnnnnnnnnnnnnnnnnnnnnnnnnnnnnnnnnnnnnnnnnnnnnnnnnnnnnnnnnnnnnnnnnnnnnnnnnnnnnnnnnnnnnnnnnnnnnnnnnnnnnnnnnnnnnnnnnnnnnnnnnnnnnnnnnnnnnnnnnnnnnnnnnnnnnnnnnnnnnnnnnnnnnnnnnnnnnnnnnnnnnnnnnnnnnnnnnnnnnnnnnnnnnnnnnnnnnnnnnnnnnnnnnnnnnnnnnnnnnnnnnnnnnnnnnnnnnnnnnnnnnnnnnnnnnnnnnnnnnnnnnnnnnnnnnnnnnnnnnnnnnnnnnnnnnnnnnnnnnnnnnnnnnnnnnnnnnnnnnnnnnnnnnnnnnnnnnnnnnnnnnnnnnnnnnnnnnnnnnnnnnnnnnnnnnnnnnnnnnnnnnnnnnnnnnnnnnnnnnnnnnnnnnnnnnnnnnnnnnnnnnnnnnnnnnnnnnnnnnnnnnnnnnnnnnnnnnnnnnnnnnnnnnnnnnnnnnnnnnnnnnnnnnnnnnnnnnnnnnnnnnnnnnnnnnnnnnnnnnnnnnnnnnnnnnnnnnnnnnnnnnnnnnnnnnnnnnnnnnnnnnnnnnnnnnnnnnnnnnnnnnnnnnnnnnnnnnnnnnnnnnnnnnnnnnnnnnnnnnnnnnnnnnnnnnnnnnnnnnnnnnnnnnnnnnnnnnnnnnnnnnnnnnnnnnnnnnnnnnnnnnnnnnnnnnnnnnnnnnnnnnnnnnnnnnnnnnnnnnnnnnnnnnnnnnnnnnnnnnnnnnnnnnnnnnnnnnnnnnnnnnnnnnnnnnnnnnnnnnnnnnnnnnnnnnnnnnnnnnnnnnnnnnnnnnnnnnnnnnnnnnnnnnnnnnnnnnnnnnnnnnnnnnnnnnnnnnnnnnnnnnnnnnnnnnnnnnnnnnnnnnnnnnnnnnnnnnnnnnnnnnnnnnnnnnnnnnnnnnnnnnnnnnnnnnnnnnnnnnnnnnnnnnnnnnnnnnnnnnnnnnnnnnnnnnnnnnnnnnnnnnnnnnnnnnnnnnnnnnnnnnnnnnnnnnnnnnnnnnnnnnnnnnnnnnnnnnnnnnnnnnnnnnnnnnnnnnnnnnnnnnnnnnnnnnnnnnnnnnnnnnnnnnnnnnnnnnnnnnnnnnnnnnnnnnnnnnnnnnnnnnnnnnnnnnnnnnnnnnnnnnnnnnnnnnnnnnnnnnnnnnnnnnnnnnnnnnnnnnnnnnnnnnnnnnnnnnnnnnnnnnnnnnnnnnnnnnnnnnnnnnnnnnnnnnnnnnnnnnnnnnnnnnnnnnnnnnnnnnnnnnnnnnnnnnnnnnnnnnnnnnnnnnnnnnnnnnnnnnnnnnnnnnnnnnnnnnnnnnnnnnnnnnnnnnnnnnnnnnnnnnnnnnnnnnnnnnnnnnnnnnnnnnnnnnnnnnnnnnnnnnnnnnnnnnnnnnnnnnnnnnnnnnnnnnnnnnnnnnnnnnnnnnnnnnnnnnnnnnnnnnnnnnnnnnnnnnnnnnnnnnnnnnnnnnnnnnnnnnnnnnnnnnnnnnnnnnnnnnnnnnnnnnnnnnnnnnnnnnnnnnnnnnnnnnnnnnnnnnnnnnnnnnnnnnnnnnnnnnnnnnnnnnnnnnnnnnnnnnnnnnnnnnnnnnnnnnnnnnnnnnnnnnnnnnnnnnnnnnnnnnnnnnnnnnnnnnnnnnnnnnnnnnnnnnnnnnnnnnnnnnnnnnnnnnnnnnnnnnnnnnnnnnnnnnnnnnnnnnnnnnnnnnnnnnnnnnnnnnnnnnnnnnnnnnnnnnnnnnnnnnnnnnnnnnnnnnnnnnnnnnnnnnnnnnnnnnnnnnnnnnnnnnnnnnnnnnnnnnnnnnnnnnnnnnnnnnnnnnnnnnnnnnnnnnnnnnnnnnnnnnnnnnnnnnnnnnnnnnnnnnnnnnnnnnnnnnnnnnnnnnnnnnnnnnnnnnnnnnnnnnnnnnnnnnnnnnnnnnnnnnnnnnnnnnnnnnnnnnnnnnnnnnnnnnnnnnnnnnnnnnnnnnnnnnnnnnnnnnnnnnnnnnnnnnnnnnnnnnnnnnnnnnnnnnnnnnnnnnnnnnnnnnnnnnnnnnnnnnnnnnnnnnnnnnnnnnnnnnnnnnnnnnnnnnnnnnnnnnnnnnnnnnnnnnnnnnnnnnnnnnnnnnnnnnnnnnnnnnnnnnnnnnnnnnnnnnnnnnnnnnnnnnnnnnnnnnnnnnnnnnnnnnnnnnnnnnnnnnnnnnnnnnnnnnnnnnnnnnnnnnnnnnnnnnnnnnnnnnnnnnnnnnnnnnnnnnnnnnnnnnnnnnnnnnnnnnnnnnnnnnnnnnnnnnnnnnnnnnnnnnnnnnnnnnnnnnnnnnnnnnnnnnnnnnnnnnnnnnnnnnnnnnnnnnnnnnnnnnnnnnnnnnnnnnnnnnnnnnnnnnnnnnnnnnnnnnnnnnnnnnnnnnnnnnnnnnnnnnnnnnnnnnnnnnnnnnnnnnnnnnnnnnnnnnnnnnnnnnnnnnnnnnnnnnnnnnnnnnnnnnnnnnnnnnnnnnnnnnnnnnnnnnnnnnnnnnnnnnnnnnnnnnnnnnnnnnnnnnnnnnnnnnnnnnnnnnnnnnnnnnnnnnnnnnnnnnnnnnnnnnnnnnnnnnnnnnnnnnnnnnnnnnnnnnnnnnnnnnnnnnnnnnnnnnnnnnnnnnnnnnnnnnnnnnnnnnnnnnnnnnnnnnnnnnnnnnnnnnnnnnnnnnnnnnnnnnnnnnnnnnnnnnnnnnnnnnnnnnnnnnnnnnnnnnnnnnnnnnnnnnnnnnnnnnnnnnnnnnnnnnnnnnnnnnnnnnnnnnnnnnnnnnnnnnnnnnnnnnnnnnnnnnnnnnnnnnnnnnnnnnnnnnnnnnnnnnnnnnnnnnnnnnnnnnnnnnnnnnnnnnnnnnnnnnnnnnnnnnnnnnnnnnnnnnnnnnnnnnnnnnnnnnnnnnnnnnnnnnnnnnnnnnnnnnnnnnnnnnnnnnnnnnnnnnnnnnnnnnnnnnnnnnnnnnnnnnnnnnnnnnnnnnnnnnnnnnnnnnnnnnnnnnnnnnnnnnnnnnnnnnnnnnnnnnnnnnnnnnnnnnnnnnnnnnnnnnnnnnnnnnnnnnnnnnnnnnnnnnnnnnnnnnnnnnnnnnnnnnnnnnnnnnnnnnnnnnnnnnnnnnnnnnnnnnnnnnnnnnnnnnnnnnnnnnnnnnnnnnnnnnnnnnnnnnnnnnnnnnnnnnnnnnnnnnnnnnnnnnnnnnnnnnnnnnnnnnnnnnnnnnnnnnnnnnnnnnnnnnnnnnnnnnnnnnnnnnnnnnnnnnnnnnnnnnnnnnnnnnnnnnnnnnnnnnnnnnnnnnnnnnnnnnnnnnnnnnnnnnnnnnnnnnnnnnnnnnnnnnnnnnnnnnnnnnnnnnnnnnnnnnnnnnnnnnnnnnnnnnnnnnnnnnnnnnnnnnnnnnnnnnnnnnnnnnnnnnnnnnnnnnnnnnnnnnnnnnnnnnnnnnnnnnnnnnnnnnnnnnnnnnnnnnnnnnnnnnnnnnnnnnnnnnnnnnnnnnnnnnnnnnnnnnnnnnnnnnnnnnnnnnnnnnnnnnnnnnnnnnnnnnnnnnnnnnnnnnnnnnnnnnnnnnnnnnnnnnnnnnnnnnnnnnnnnnnnnnnnnnnnnnnnnnnnnnnnnnnnnnnnnnnnnnnnnnnnnnnnnnnnnnnnnnnnnnnnnnnnnnnnnnnnnnnnnnnnnnnnnnnnnnnnnnnnnnnnnnnnnnnnnnnnnnnnnnnnnnnnnnnnnnnnnnnnnnnnnnnnnnnnnnnnnnnnnnnnnnnnnnnnnnnnnnnnnnnnnnnnnnnnnnnnnnnnnnnnnnnnnnnnnnnnnnnnnnnnnnnnnnnnnnnnnnnnnnnnnnnnnnnnnnnnnnnnnnnnnnnnnnnnnnnnnnnnnnnnnnnnnnnnnnnnnnnnnnnnnnnnnnnnnnnnnnnnnnnnnnnnnnnnnnnnnnnnnnnnnnnnnnnnnnnnnnnnnnnnnnnnnnnnnnnnnnnnnnnnnnnnnnnnnnnnnnnnnnnnnnnnnnnnnnnnnnnnnnnnnnnnnnnnnnnnnnnnnnnnnnnnnnnnnnnnnnnnnnnnnnnnnnnnnnnnnnnnnnnnnnnnnnnnnnnnnnnnnnnnnnnnnnnnnnnnnnnnnnnnnnnnnnnnnnnnnnnnnnnnnnnnnnnnnnnnnnnnnnnnnnnnnnnnnnnnnnnnnnnnnnnnnnnnnnnnnnnnnnnnnnnnnnnnnnnnnnnnnnnnnnnnnnnnnnnnnnnnnnnnnnnnnnnnnnnnnnnnnnnnnnnnnnnnnnnnnnnnnnnnnnnnnnnnnnnnnnnnnnnnnnnnnnnnnnnnnnnnnnnnnnnnnnnnnnnnnnnnnnnnnnnnnnnnnnnnnnnnnnnnnnnnnnnnnnnnnnnnnnnnnnnnnnnnnnnnnnnnnnnnnnnnnnnnnnnnnnnnnnnnnnnnnnnnnnnnnnnnnnnnnnnnnnnnnnnnnnnnnnnnnnnnnnnnnnnnnnnnnnnnnnnnnnnnnnnnnnnnnnnnnnnnnnnnnnnnnnnnnnnnnnnnnnnnnnnnnnnnnnnnnnnnnnnnnnnnnnnnnnnnnnnnnnnnnnnnnnnnnnnnnnnnnnnnnnnnnnnnnnnnnnnnnnnnnnnnnnnnnnnnnnnnnnnnnnnnnnnnnnnnnnnnnnnnnnnnnnnnnnnnnnnnnnnnnnnnnnnnnnnnnnnnnnnnnnnnnnnnnnnnnnnnnnnnnnnnnnnnnnnnnnnnnnnnnnnnnnnnnnnnnnnnnnnnnnnnnnnnnnnnnnnnnnnnnnnnnnnnnnnnnnnnnnnnnnnnnnnnnnnnnnnnnnnnnnnnnnnnnnnnnnnnnnnnnnnnnnnnnnnnnnnnnnnnnnnnnnnnnnnnnnnnnnnnnnnnnnnnnnnnnnnnnnnnnnnnnnnnnnnnnnnnnnnnnnnnnnnnnnnnnnnnnnnnnnnnnnnnnnnnnnnnnnnnnnnnnnnnnnnnnnnnnnnnnnnnnnnnnnnnnnnnnnnnnnnnnnnnnnnnnnnnnnnnnnnnnnnnnnnnnnnnnnnnnnnnnnnnnnnnnnnnnnnnnnnnnnnnnnnnnnnnnnnnnnnnnnnnnnnnnnnnnnnnnnnnnnnnnnnnnnnnnnnnnnnnnnnnnnnnnnnnnnnnnnnnnnnnnnnnnnnnnnnnnnnnnnnnnnnnnnnnnnnnnnnnnnnnnnnnnnnnnnnnnnnnnnnnnnnnnnnnnnnnnnnnnnnnnnnnnnnnnnnnnnnnnnnnnnnnnnnnnnnnnnnnnnnnnnnnnnnnnnnnnnnnnnnnnnnnnnnnnnnnnnnnnnnnnnnnnnnnnnnnnnnnnnnnnnnnnnnnnnnnnnnnnnnnnnnnnnnnnnnnnnnnnnnnnnnnnnnnnnnnnnnnnnnnnnnnnnnnnnnnnnnnnnnnnnnnnnnnnnnnnnnnnnnnnnnnnnnnnnnnnnnnnnnnnnnnnnnnnnnnnnnnnnnnnnnnnnnnnnnnnnnnnnnnnnnnnnnnnnnnnnnnnnnnnnnnnnnnnnnnnnnnnnnnnnnnnnnnnnnnnnnnnnnnnnnnnnnnnnnnnnnnnnnnnnnnnnnnnnnnnnnnnnnnnnnnnnnnnnnnnnnnnnnnnnnnnnnnnnnnnnnnnnnnnnnnnnnnnnnnnnnnnnnnnnnnnnnnnnnnnnnnnnnnnnnnnnnnnnnnnnnnnnnnnnnnnnnnnnnnnnnnnnnnnnnnnnnnnnnnnnnnnnnnnnnnnnnnnnnnnnnnnnnnnnnnnnnnnnnnnnnnnnnnnnnnnnnnnnnnnnnnnnnnnnnnnnnnnnnnnnnnnnnnnnnnnnnnnnnnnnnnnnnnnnnnnnnnnnnnnnnnnnnnnnnnnnnnnnnnnnnnnnnnnnnnnnnnnnnnnnnnnnnnnnnnnnnnnnnnnnnnnnnnnnnnnnnnnnnnnnnnnnnnnnnnnnnnnnnnnnnnnnnnnnnnnnnnnnnnnnnnnnnnnnnnnnnnnnnnnnnnnnnnnnnnnnnnnnnnnnnnnnnnnnnnnnnnnnnnnnnnnnnnnnnnnnnnnnnnnnnnnnnnnnnnnnnnnnnnnnnnnnnnnnnnnnnnnnnnnnnnnnnnnnnnnnnnnnnnnnnnnnnnnnnnnnnnnnnnnnnnnnnnnnnnnnnnnnnnnnnnnnnnnnnnnnnnnnnnnnnnnnnnnnnnnnnnnnnnnnnnnnnnnnnnnnnnnnnnnnnnnnnnnnnnnnnnnnnnnnnnnnnnnnnnnnnnnnnnnnnnnnnnnnnnnnnnnnnnnnnnnnnnnnnnnnnnnnnnnnnnnnnnnnnnnnnnnnnnnnnnnnnnnnnnnnnnnnnnnnnnnnnnnnnnnnnnnnnnnnnnnnnnnnnnnnnnnnnnnnnnnnnnnnnnnnnnnnnnnnnnnnnnnnnnnnnnnnnnnnnnnnnnnnnnnnnnnnnnnnnnnnnnnnnnnnnnnnnnnnnnnnnnnnnnnnnnnnnnnnnnnnnnnnnnnnnnnnnnnnnnnnnnnnnnnnnnnnnnnnnnnnnnnnnnnnnnnnnnnnnnnnnnnnnnnnnnnnnnnnnnnnnnnnnnnnnnnnnnnnnnnnnnnnnnnnnnnnnnnnnnnnnnnnnnnnnnnnnnnnnnnnnnnnnnnnnnnnnnnnnnnnnnnnnnnnnnnnnnnnnnnnnnnnnnnnnnnnnnnnnnnnnnnnnnnnnnnnnnnnnnnnnnnnnnnnnnnnnnnnnnnnnnnnnnnnnnnnnnnnnnnnnnnnnnnnnnnnnnnnnnnnnnnnnnnnnnnnnnnnnnnnnnnnnnnnnnnnnnnnnnnnnnnnnnnnnnnnnnnnnnnnnnnnnnnnnnnnnnnnnnnnnnnnnnnnnnnnnnnnnnnnnnnnnnnnnnnnnnnnnnnnnnnnnnnnnnnnnnnnnnnnnnnnnnnnnnnnnnnnnnnnnnnnnnnnnnnnnnnnnnnnnnnnnnnnnnnnnnnnnnnnnnnnnnnnnnnnnnnnnnnnnnnnnnnnnnnnnnnnnnnnnnnnnnnnnnnnnnnnnnnnnnnnnnnnnnnnnnnnnnnnnnnnnnnnnnnnnnnnnnnnnnnnnnnnnnnnnnnnnnnnnnnnnnnnnnnnnnnnnnnnnnnnnnnnnnnnnnnnnnnnnnnnnnnnnnnnnnnnnnnnnnnnnnnnnnnnnnnnnnnnnnnnnnnnnnnnnnnnnnnnnnnnnnnnnnnnnnnnnnnnnnnnnnnnnnnnnnnnnnnnnnnnnnnnnnnnnnnnnnnnnnnnnnnnnnnnnnnnnnnnnnnnnnnnnnnnnnnnnnnnnnnnnnnnnnnnnnnnnnnnnnnnnnnnnnnnnnnnnnnnnnnnnnnnnnnnnnnnnnnnnnnnnnnnnnnnnnnnnnnnnnnnnnnnnnnnnnnnnnnnnnnnnnnnnnnnnnnnnnnnnnnnnnnnnnnnnnnnnnnnnnnnnnnnnnnnnnnnnnnnnnnnnnnnnnnnnnnnnnnnnnnnnnnnnnnnnnnnnnnnnnnnnnnnnnnnnnnnnnnnnnnnnnnnnnnnnnnnnnnnnnnnnnnnnnnnnnnnnnnnnnnnnnnnnnnnnnnnnnnnnnnnnnnnnnnnnnnnnnnnnnnnnnnnnnnnnnnnnnnnnnnnnnnnnnnnnnnnnnnnnnnnnnnnnnnnnnnnnnnnnnnnnnnnnnnnnnnnnnnnnnnnnnnnnnnnnnnnnnnnnnnnnnnnnnnnnnnnnnnnnnnnnnnnnnnnnnnnnnnnnnnnnnnnnnnnnnnnnnnnnnnnnnnnnnnnnnnnnnnnnnnnnnnnnnnnnnnnnnnnnnnnnnnnnnnnnnnnnnnnnnnnnnnnnnnnnnnnnnnnnnnnnnnnnnnnnnnnnnnnnnnnnnnnnnnnnnnnnnnnnnnnnnnnnnnnnnnnnnnnnnnnnnnnnnnnnnnnnnnnnnnnnnnnnnnnnnnnnnnnnnnnnnnnnnnnnnnnnnnnnnnnnnnnnnnnnnnnnnnnnnnnnnnnnnnnnnnnnnnnnnnnnnnnnnnnnnnnnnnnnnnnnnnnnnnnnnnnnnnnnnnnnnnnnnnnnnnnnnnnnnnnnnnnnnnnnnnnnnnnnnnnnnnnnnnnnnnnnnnnnnnnnnnnnnnnnnnnnnnnnnnnnnnnnnnnnnnnnnnnnnnnnnnnnnnnnnnnnnnnnnnnnnnnnnnnnnnnnnnnnnnnnnnnnnnnnnnnnnnnnnnnnnnnnnnnnnnnnnnnnnnnnnnnnnnnnnnnnnnnnnnnnnnnnnnnnnnnnnnnnnnnnnnnnnnnnnnnnnnnnnnnnnnnnnnnnnnnnnnnnnnnnnnnnnnnnnnnnnnnnnnnnnnnnnnnnnnnnnnnnnnnnnnnnnnnnnnnnnnnnnnnnnnnnnnnnnnnnnnnnnnnnnnnnnnnnnnnnnnnnnnnnnnnnnnnnnnnnnnnnnnnnnnnnnnnnnnnnnnnnnnnnnnnnnnnnnnnnnnnnnnnnnnnnnnnnnnnnnnnnnnnnnnnnnnnnnnnnnnnnnnnnnnnnnnnnnnnnnnnnnnnnnnnnnnnnnnnnnnnnnnnnnnnnnnnnnnnnnnnnnnnnnnnnnnnnnnnnnnnnnnnnnnnnnnnnnnnnnnnnnnnnnnnnnnnnnnnnnnnnnnnnnnnnnnnnnnnnnnnnnnnnnnnnnnnnnnnnnnnnnnnnnnnnnnnnnnnnnnnnnnnnnnnnnnnnnnnnnnnnnnnnnnnnnnnnnnnnnnnnnnnnnnnnnnnnnnnnnnnnnnnnnnnnnnnnnnnnnnnnnnnnnnnnnnnnnnnnnnnnnnnnnnnnnnnnnnnnnnnnnnnnnnnnnnnnnnnnnnnnnnnnnnnnnnnnnnnnnnnnnnnnnnnnnnnnnnnnnnnnnnnnnnnnnnnnnnnnnnnnnnnnnnnnnnnnnnnnnnnnnnnnnnnnnnnnnnnnnnnnnnnnnnnnnnnnnnnnnnnnnnnnnnnnnnnnnnnnnnnnnnnnnnnnnnnnnnnnnnnnnnnnnnnnnnnnnnnnnnnnnnnnnnnnnnnnnnnnnnnnnnnnnnnnnnnnnnnnnnnnnnnnnnnnnnnnnnnnnnnnnnnnnnnnnnnnnnnnnnnnnnnnnnnnnnnnnnnnnnnnnnnnnnnnnnnnnnnnnnnnnnnnnnnnnnnnnnnnnnnnnnnnnnnnnnnnnnnnnnnnnnnnnnnnnnnnnnnnnnnnnnnnnnnnnnnnnnnnnnnnnnnnnnnnnnnnnnnnnnnnnnnnnnnnnnnnnnnnnnnnnnnnnnnnnnnnnnnnnnnnnnnnnnnnnnnnnnnnnnnnnnnnnnnnnnnnnnnnnnnnnnnnnnnnnnnnnnnnnnnnnnnnnnnnnnnnnnnnnnnnnnnnnnnnnnnnnnnnnnnnnnnnnnnnnnnnnnnnnnnnnnnnnnnnnnnnnnnnnnnnnnnnnnnnnnnnnnnnnnnnnnnnnnnnnnnnnnnnnnnnnnnnnnnnnnnnnnnnnnnnnnnnnnnnnnnnnnnnnnnnnnnnnnnnnnnnnnnnnnnnnnnnnnnnnnnnnnnnnnnnnnnnnnnnnnnnnnnnnnnnnnnnnnnnnnnnnnnnnnnnnnnnnnnnnnnnnnnnnnnnnnnnnnnnnnnnnnnnnnnnnnnnnnnnnnnnnnnnnnnnnnnnnnnnnnnnnnnnnnnnnnnnnnnnnnnnnnnnnnnnnnnnnnnnnnnnnnnnnnnnnnnnnnnnnnnnnnnnnnnnnnnnnnnnnnnnnnnnnnnnnnnnnnnnnnnnnnnnnnnnnnnnnnnnnnnnnnnnnnnnnnnnnnnnnnnnnnnnnnnnnnnnnnnnnnnnnnnnnnnnnnnnnnnnnnnnnnnnnnnnnnnnnnnnnnnnnnnnnnnnnnnnnnnnnnnnnnnnnnnnnnnnnnnnnnnnnnnnnnnnnnnnnnnnnnnnnnnnnnnnnnnnnnnnnnnnnnnnnnnnnnnnnnnnnnnnnnnnnnnnnnnnnnnnnnnnnnnnnnnnnnnnnnnnnnnnnnnnnnnnnnnnnnnnnnnnnnnnnnnnnnnnnnnnnnnnnnnnnnnnnnnnnnnnnnnnnnnnnnnnnnnnnnnnnnnnnnnnnnnnnnnnnnnnnnnnnnnnnnnnnnnnnnnnnnnnnnnnnnnnnnnnnnnnnnnnnnnnnnnnnnnnnnnnnnnnnnnnnnnnnnnnnnnnnnnnnnnnnnnnnnnnnnnnnnnnnnnnnnnnnnnnnnnnnnnnnnnnnnnnnnnnnnnnnnnnnnnnnnnnnnnnnnnnnnnnnnnnnnnnnnnnnnnnnnnnnnnnnnnnnnnnnnnnnnnnnnnnnnnnnnnnnnnnnnnnnnnnnnnnnnnnnnnnnnnnnnnnnnnnnnnnnnnnnnnnnnnnnnnnnnnnnnnnnnnnnnnnnnnnnnnnnnnnnnnnnnnnnnnnnnnnnnnnnnnnnnnnnnnnnnnnnnnnnnnnnnnnnnnnnnnnnnnnnnnnnnnnnnnnnnnnnnnnnnnnnnnnnnnnnnnnnnnnnnnnnnnnnnnnnnnnnnnnnnnnnnnnnnnnnnnnnnnnnnnnnnnnnnnnnnnnnnnnnnnnnnnnnnnnnnnnnnnnnnnnnnnnnnnnnnnnnnnnnnnnnnnnnnnnnnnnnnnnnnnnnnnnnnnnnnnnnnnnnnnnnnnnnnnnnnnnnnnnnnnnnnnnnnnnnnnnnnnnnnnnnnnnnnnnnnnnnnnnnnnnnnnnnnnnnnnnnnnnnnnnnnnnnnnnnnnnnnnnnnnnnnnnnnnnnnnnnnnnnnnnnnnnnnnnnnnnnnnnnnnnnnnnnnnnnnnnnnnnnnnnnnnnnnnnnnnnnnnnnnnnnnnnnnnnnnnnnnnnnnnnnnnnnnnnnnnnnnnnnnnnnnnnnnnnnnnnnnnnnnnnnnnnnnnnnnnnnnnnnnnnnnnnnnnnnnnnnnnnnnnnnnnnnnnnnnnnnnnnnnnnnnnnnnnnnnnnnnnnnnnnnnnnnnnnnnnnnnnnnnnnnnnnnnnnnnnnnnnnnnnnnnnnnnnnnnnnnnnnnnnnnnnnnnnnnnnnnnnnnnnnnnnnnnnnnnnnnnnnnnnnnnnnnnnnnnnnnnnnnnnnnnnnnnnnnnnnnnnnnnnnnnnnnnnnnnnnnnnnnnnnnnnnnnnnnnnnnnnnnnnnnnnnnnnnnnnnnnnnnnnnnnnnnnnnnnnnnnnnnnnnnnnnnnnnnnnnnnnnnnnnnnnnnnnnnnnnnnnnnnnnnnnnnnnnnnnnnnnnnnnnnnnnnnnnnnnnnnnnnnnnnnnnnnnnnnnnnnnnnnnnnnnnnnnnnnnnnnnnnnnnnnnnnnnnnnnnnnnnnnnnnnnnnnnnnnnnnnnnnnnnnnnnnnnnnnnnnnnnnnnnnnnnnnnnnnnnnnnnnnnnnnnnnnnnnnnnnnnnnnnnnnnnnnnnnnnnnnnnnnnnnnnnnnnnnnnnnnnnnnnnnnnnnnnnnnnnnnnnnnnnnnnnnnnnnnnnnnnnnnnnnnnnnnnnnnnnnnnnnnnnnnnnnnnnnnnnnnnnnnnnnnnnnnnnnnnnnnnnnnnnnnnnnnnnnnnnnnnnnnnnnnnnnnnnnnnnnnnnnnnnnnnnnnnnnnnnnnnnnnnnnnnnnnnnnnnnnnnnnnnnnnnnnnnnnnnnnnnnnnnnnnnnnnnnnnnnnnnnnnnnnnnnnnnnnnnnnnnnnnnnnnnnnnnnnnnnnnnnnnnnnnnnnnnnnnnnnnnnnnnnnnnnnnnnnnnnnnnnnnnnnnnnnnnnnnnnnnnnnnnnnnnnnnnnnnnnnnnnnnnnnnnnnnnnnnnnnnnnnnnnnnnnnnnnnnnnnnnnnnnnnnnnnnnnnnnnnnnnnnnnnnnnnnnnnnnnnnnnnnnnnnnnnnnnnnnnnnnnnnnnnnnnnnnnnnnnnnnnnnnnnnnnnnnnnnnnnnnnnnnnnnnnnnnnnnnnnnnnnnnnnnnnnnnnnnnnnnnnnnnnnnnnnnnnnnnnnnnnnnnnnnnnnnnnnnnnnnnnnnnnnnnnnnnnnnnnnnnnnnnnnnnnnnnnnnnnnnnnnnnnnnnnnnnnnnnnnnnnnnnnnnnnnnnnnnnnnnnnnnnnnnnnnnnnnnnnnnnnnnnnnnnnnnnnnnnnnnnnnnnnnnnnnnnnnnnnnnnnnnnnnnnnnnnnnnnnnnnnnnnnnnnnnnnnnnnnnnnnnnnnnnnnnnnnnnnnnnnnnnnnnnnnnnnnnnnnnnnnnnnnnnnnnnnnnnnnnnnnnnnnnnnnnnnnnnnnnnnnnnnnnnnnnnnnnnnnnnnnnnnnnnnnnnnnnnnnnnnnnnnnnnnnnnnnnnnnnnnnnnnnnnnnnnnnnnnnnnnnnnnnnnnnnnnnnnnnnnnnnnnnnnnnnnnnnnnnnnnnnnnnnnnnnnnnnnnnnnnnnnnnnnnnnnnnnnnnnnnnnnnnnnnnnnnnnnnnnnnnnnnnnnnnnnnnnnnnnnnnnnnnnnnnnnnnnnnnnnnnnnnnnnnnnnnnnnnnnnnnnnnnnnnnnnnnnnnnnnnnnnnnnnnnnnnnnnnnnnnnnnnnnnnnnnnnnnnnnnnnnnnnnnnnnnnnnnnnnnnnnnnnnnnnnnnnnnnnnnnnnnnnnnnnnnnnnnnnnnnnnnnnnnnnnnnnnnnnnnnnnnnnnnnnnnnnnnnnnnnnnnnnnnnnnnnnnnnnnnnnnnnnnnnnnnnnnnnnnnnnnnnnnnnnnnnnnnnnnnnnnnnnnnnnnnnnnnnnnnnnnnnnnnnnnnnnnnnnnnnnnnnnnnnnnnnnnnnnnnnnnnnnnnnnnnnnnnnnnnnnnnnnnnnnnnnnnnnnnnnnnnnnnnnnnnnnnnnnnnnnnnnnnnnnnnnnnnnnnnnnnnnnnnnnnnnnnnnnnnnnnnnnnnnnnnnnnnnnnnnnnnnnnnnnnnnnnnnnnnnnnnnnnnnnnnnnnnnnnnnnnnnnnnnnnnnnnnnnnnnnnnnnnnnnnnnnnnnnnnnnnnnnnnnnnnnnnnnnnnnnnnnnnnnnnnnnnnnnnnnnnnnnnnnnnnnnnnnnnnnnnnnnnnnnnnnnnnnnnnnnnnnnnnnnnnnnnnnnnnnnnnnnnnnnnnnnnnnnnnnnnnnnnnnnnnnnnnnnnnnnnnnnnnnnnnnnnnnnnnnnnnnnnnnnnnnnnnnnnnnnnnnnnnnnnnnnnnnnnnnnnnnnnnnnnnnnnnnnnnnnnnnnnnnnnnnnnnnnnnnnnnnnnnnnnnnnnnnnnnnnnnnnnnnnnnnnnnnnnnnnnnnnnnnnnnnnnnnnnnnnnnnnnnnnnnnnnnnnnnnnnnnnnnnnnnnnnnnnnnnnnnnnnnnnnnnnnnnnnnnnnnnnnnnnnnnnnnnnnnnnnnnnnnnnnnnnnnnnnnnnnnnnnnnnnnnnnnnnnnnnnnnnnnnnnnnnnnnnnnnnnnnnnnnnnnnnnnnnnnnnnnnnnnnnnnnnnnnnnnnnnnnnnnnnnnnnnnnnnnnnnnnnnnnnnnnnnnnnnnnnnnnnnnnnnnnnnnnnnnnnnnnnnnnnnnnnnnnnnnnnnnnnnnnnnnnnnnnnnnnnnnnnnnnnnnnnnnnnnnnnnnnnnnnnnnnnnnnnnnnnnnnnnnnnnnnnnnnnnnnnnnnnnnnnnnnnnnnnnnnnnnnnnnnnnnnnnnnnnnnnnnnnnnnnnnnnnnnnnnnnnnnnnnnnnnnnnnnnnnnnnnnnnnnnnnnnnnnnnnnnnnnnnnnnnnnnnnnnnnnnnnnnnnnnnnnnnnnnnnnnnnnnnnnnnnnnnnnnnnnnnnnnnnnnnnnnnnnnnnnnnnnnnnnnnnnnnnnnnnnnnnnnnnnnnnnnnnnnnnnnnnnnnnnnnnnnnnnnnnnnnnnnnnnnnnnnnnnnnnnnnnnnnnnnnnnnnnnnnnnnnnnnnnnnnnnnnnnnnnnnnnnnnnnnnnnnnnnnnnnnnnnnnnnnnnnnnnnnnnnnnnnnnnnnnnnnnnnnnnnnnnnnnnnnnnnnnnnnnnnnnnnnnnnnnnnnnnnnnnnnnnnnnnnnnnnnnnnnnnnnnnnnnnnnnnnnnnnnnnnnnnnnnnnnnnnnnnnnnnnnnnnnnnnnnnnnnnnnnnnnnnnnnnnnnnnnnnnnnnnnnnnnnnnnnnnnnnnnnnnnnnnnnnnnnnnnnnnnnnnnnnnnnnnnnnnnnnnnnnnnnnnnnnnnnnnnnnnnnnnnnnnnnnnnnnnnnnnnnnnnnnnnnnnnnnnnnnnnnnnnnnnnnnnnnnnnnnnnnnnnnnnnnnnnnnnnnnnnnnnnnnnnnnnnnnnnnnnnnnnnnnnnnnnnnnnnnnnnnnnnnnnnnnnnnnnnnnnnnnnnnnnnnnnnnnnnnnnnnnnnnnnnnnnnnnnnnnnnnnnnnnnnnnnnnnnnnnnnnnnnnnnnnnnnnnnnnnnnnnnnnnnnnnnnnnnnnnnnnnnnnnnnnnnnnnnnnnnnnnnnnnnnnnnnnnnnnnnnnnnnnnnnnnnnnnnnnnnnnnnnnnnnnnnnnnnnnnnnnnnnnnnnnnnnnnnnnnnnnnnnnnnnnnnnnnnnnnnnnnnnnnnnnnnnnnnnnnnnnnnnnnnnnnnnnnnnnnnnnnnnnnnnnnnnnnnnnnnnnnnnnnnnnnnnnnnnnnnnnnnnnnnnnnnnnnnnnnnnnnnnnnnnnnnnnnnnnnnnnnnnnnnnnnnnnnnnnnnnnnnnnnnnnnnnnnnnnnnnnnnnnnnnnnnnnnnnnnnnnnnnnnnnnnnnnnnnnnnnnnnnnnnnnnnnnnnnnnnnnnnnnnnnnnnnnnnnnnnnnnnnnnnnnnnnnnnnnnnnnnnnnnnnnnnnnnnnnnnnnnnnnnnnnnnnnnnnnnnnnnnnnnnnnnnnnnnnnnnnnnnnnnnnnnnnnnnnnnnnnnnnnnnnnnnnnnnnnnnnnnnnnnnnnnnnnnnnnnnnnnnnnnnnnnnnnnnnnnnnnnnnnnnnnnnnnnnnnnnnnnnnnnnnnnnnnnnnnnnnnnnnnnnnnnnnnnnnnnnnnnnnnnnnnnnnnnnnnnnnnnnnnnnnnnnnnnnnnnnnnnnnnnnnnnnnnnnnnnnnnnnnnnnnnnnnnnnnnnnnnnnnnnnnnnnnnnnnnnnnnnnnnnnnnnnnnnnnnnnnnnnnnnnnnnnnnnnnnnnnnnnnnnnnnnnnnnnnnnnnnnnnnnnnnnnnnnnnnnnnnnnnnnnnnnnnnnnnnnnnnnnnnnnnnnnnnnnnnnnnnnnnnnnnnnnnnnnnnnnnnnnnnnnnnnnnnnnnnnnnnnnnnnnnnnnnnnnnnnnnnnnnnnnnnnnnnnnnnnnnnnnnnnnnnnnnnnnnnnnnnnnnnnnnnnnnnnnnnnnnnnnnnnnnnnnnnnnnnnnnnnnnnnnnnnnnnnnnnnnnnnnnnnnnnnnnnnnnnnnnnnnnnnnnnnnnnnnnnnnnnnnnnnnnnnnnnnnnnnnnnnnnnnnnnnnnnnnnnnnnnnnnnnnnnnnnnnnnnnnnnnnnnnnnnnnnnnnnnnnnnnnnnnnnnnnnnnnnnnnnnnnnnnnnnnnnnnnnnnnnnnnnnnnnnnnnnnnnnnnnnnnnnnnnnnnnnnnnnnnnnnnnnnnnnnnnnnnnnnnnnnnnnnnnnnnnnnnnnnnnnnnnnnnnnnnnnnnnnnnnnnnnnnnnnnnnnnnnnnnnnnnnnnnnnnnnnnnnnnnnnnnnnnnnnnnnnnnnnnnnnnnnnnnnnnnnnnnnnnnnnnnnnnnnnnnnnnnnnnnnnnnnnnnnnnnnnnnnnnnnnnnnnnnnnnnnnnnnnnnnnnnnnnnnnnnnnnnnnnnnnnnnnnnnnnnnnnnnnnnnnnnnnnnnnnnnnnnnnnnnnnnnnnnnnnnnnnnnnnnnnnnnnnnnnnnnnnnnnnnnnnnnnnnnnnnnnnnnnnnnnnnnnnnnnnnnnnnnnnnnnnnnnnnnnnnnnnnnnnnnnnnnnnnnnnnnnnnnnnnnnnnnnnnnnnnnnnnnnnnnnnnnnnnnnnnnnnnnnnnnnnnnnnnnnnnnnnnnnnnnnnnnnnnnnnnnnnnnnnnnnnnnnnnnnnnnnnnnnnnnnnnnnnnnnnnnnnnnnnnnnnnnnnnnnnnnnnnnnnnnnnnnnnnnnnnnnnnnnnnnnnnnnnnnnnnnnnnnnnnnnnnnnnnnnnnnnnnnnnnnnnnnnnnnnnnnnnnnnnnnnnnnnnnnnnnnnnnnnnnnnnnnnnnnnnnnnnnnnnnnnnnnnnnnnnnnnnnnnnnnnnnnnnnnnnnnnnnnnnnnnnnnnnnnnnnnnnnnnnnnnnnnnnnnnnnnnnnnnnnnnnnnnnnnnnnnnnnnnnnnnnnnnnnnnnnnnnnnnnnnnnnnnnnnnnnnnnnnnnnnnnnnnnnnnnnnnnnnnnnnnnnnnnnnnnnnnnnnnnnnnnnnnnnnnnnnnnnnnnnnnnnnnnnnnnnnnnnnnnnnnnnnnnnnnnnnnnnnnnnnnnnnnnnnnnnnnnnnnnnnnnnnnnnnnnnnnnnnnnnnnnnnnnnnnnnnnnnnnnnnnnnnnnnnnnnnnnnnnnnnnnnnnnnnnnnnnnnnnnnnnnnnnnnnnnnnnnnnnnnnnnnnnnnnnnnnnnnnnnnnnnnnnnnnnnnnnnnnnnnnnnnnnnnnnnnnnnnnnnnnnnnnnnnnnnnnnnnnnnnnnnnnnnnnnnnnnnnnnnnnnnnnnnnnnnnnnnnnnnnnnnnnnnnnnnnnnnnnnnnnnnnnnnnnnnnnnnnnnnnnnnnnnnnnnnnnnnnnnnnnnnnnnnnnnnnnnnnnnnnnnnnnnnnnnnnnnnnnnnnnnnnnnnnnnnnnnnnnnnnnnnnnnnnnnnnnnnnnnnnnnnnnnnnnnnnnnnnnnnnnnnnnnnnnnnnnnnnnnnnnnnnnnnnnnnnnnnnnnnnnnnnnnnnnnnnnnnnnnnnnnnnnnnnnnnnnnnnnnnnnnnnnnnnnnnnnnnnnnnnnnnnnnnnnnnnnnnnnnnnnnnnnnnnnnnnnnnnnnnnnnnnnnnnnnnnnnnnnnnnnnnnnnnnnnnnnnnnnnnnnnnnnnnnnnnnnnnnnnnnnnnnnnnnnnnnnnnnnnnnnnnnnnnnnnnnnnnnnnnnnnnnnnnnnnnnnnnnnnnnnnnnnnnnnnnnnnnnnnnnnnnnnnnnnnnnnnnnnnnnnnnnnnnnnnnnnnnnnnnnnnnnnnnnnnnnnnnnnnnnnnnnnnnnnnnnnnnnnnnnnnnnnnnnnnnnnnnnnnnnnnnnnnnnnnnnnnnnnnnnnnnnnnnnnnnnnnnnnnnnnnnnnnnnnnnnnnnnnnnnnnnnnnnnnnnnnnnnnnnnnnnnnnnnnnnnnnnnnnnnnnnnnnnnnnnnnnnnnnnnnnnnnnnnnnnnnnnnnnnnnnnnnnnnnnnnnnnnnnnnnnnnnnnnnnnnnnnnnnnnnnnnnnnnnnnnnnnnnnnnnnnnnnnnnnnnnnnnnnnnnnnnnnnnnnnnnnnnnnnnnnnnnnnnnnnnnnnnnnnnnnnnnnnnnnnnnnnnnnnnnnnnnnnnnnnnnnnnnnnnnnnnnnnnnnnnnnnnnnnnnnnnnnnnnnnnnnnnnnnnnnnnnnnnnnnnnnnnnnnnnnnnnnnnnnnnnnnnnnnnnnnnnnnnnnnnnnnnnnnnnnnnnnnnnnnnnnnnnnnnnnnnnnnnnnnnnnnnnnnnnnnnnnnnnnnnnnnnnnnnnnnnnnnnnnnnnnnnnnnnnnnnnnnnnnnnnnnnnnnnnnnnnnnnnnnnnnnnnnnnnnnnnnnnnnnnnnnnnnnnnnnnnnnnnnnnnnnnnnnnnnnnnnnnnnnnnnnnnnnnnnnnnnnnnnnnnnnnnnnnnnnnnnnnnnnnnnnnnnnnnnnnnnnnnnnnnnnnnnnnnnnnnnnnnnnnnnnnnnnnnnnnnnnnnnnnnnnnnnnnnnnnnnnnnnnnnnnnnnnnnnnnnnnnnnnnnnnnnnnnnnnnnnnnnnnnnnnnnnnnnnnnnnnnnnnnnnnnnnnnnnnnnnnnnnnnnnnnnnnnnnnnnnnnnnnnnnnnnnnnnnnnnnnnnnnnnnnnnnnnnnnnnnnnnnnnnnnnnnnnnnnnnnnnnnnnnnnnnnnnnnnnnnnnnnnnnnnnnnnnnnnnnnnnnnnnnnnnnnnnnnnnnnnnnnnnnnnnnnnnnnnnnnnnnnnnnnnnnnnnnnnnnnnnnnnnnnnnnnnnnnnnnnnnnnnnnnnnnnnnnnnnnnnnnnnnnnnnnnnnnnnnnnnnnnnnnnnnnnnnnnnnnnnnnnnnnnnnnnnnnnnnnnnnnnnnnnnnnnnnnnnnnnnnnnnnnnnnnnnnnnnnnnnnnnnnnnnnnnnnnnnnnnnnnnnnnnnnnnnnnnnnnnnnnnnnnnnnnnnnnnnnnnnnnnnnnnnnnnnnnnnnnnnnnnnnnnnnnnnnnnnnnnnnnnnnnnnnnnnnnnnnnnnnnnnnnnnnnnnnnnnnnnnnnnnnnnnnnnnnnnnnnnnnnnnnnnnnnnnnnnnnnnnnnnnnnnnnnnnnnnnnnnnnnnnnnnnnnnnnnnnnnnnnnnnnnnnnnnnnnnnnnnnnnnnnnnnnnnnnnnnnnnnnnnnnnnnnnnnnnnnnnnnnnnnnnnnnnnnnnnnnnnnnnnnnnnnnnnnnnnnnnnnnnnnnnnnnnnnnnnnnnnnnnnnnnnnnnnnnnnnnnnnnnnnnnnnnnnnnnnnnnnnnnnnnnnnnnnnnnnnnnnnnnnnnnnnnnnnnnnnnnnnnnnnnnnnnnnnnnnnnnnnnnnnnnnnnnnnnnnnnnnnnnnnnnnnnnnnnnnnnnnnnnnnnnnnnnnnnnnnnnnnnnnnnnnnnnnnnnnnnnnnnnnnnnnnnnnnnnnnnnnnnnnnnnnnnnnnnnnnnnnnnnnnnnnnnnnnnnnnnnnnnnnnnnnnnnnnnnnnnnnnnnnnnnnnnnnnnnnnnnnnnnnnnnnnnnnnnnnnnnnnnnnnnnnnnnnnnnnnnnnnnnnnnnnnnnnnnnnnnnnnnnnnnnnnnnnnnnnnnnnnnnnnnnnnnnnnnnnnnnnnnnnnnnnnnnnnnnnnnnnnnnnnnnnnnnnnnnnnnnnnnnnnnnnnnnnnnnnnnnnnnnnnnnnnnnnnnnnnnnnnnnnnnnnnnnnnnnnnnnnnnnnnnnnnnnnnnnnnnnnnnnnnnnnnnnnnnnnnnnnnnnnnnnnnnnnnnnnnnnnnnnnnnnnnnnnnnnnnnnnnnnnnnnnnnnnnnnnnnnnnnnnnnnnnnnnnnnnnnnnnnnnnnnnnnnnnnnnnnnnnnnnnnnnnnnnnnnnnnnnnnnnnnnnnnnnnnnnnnnnnnnnnnnnnnnnnnnnnnnnnnnnnnnnnnnnnnnnnnnnnnnnnnnnnnnnnnnnnnnnnnnnnnnnnnnnnnnnnnnnnnnnnnnnnnnnnnnnnnnnnnnnnnnnnnnnnnnnnnnnnnnnnnnnnnnnnnnnnnnnnnnnnnnnnnnnnnnnnnnnnnnnnnnnnnnnnnnnnnnnnnnnnnnnnnnnnnnnnnnnnnnnnnnnnnnnnnnnnnnnnnnnnnnnnnnnnnnnnnnnnnnnnnnnnnnnnnnnnnnnnnnnnnnnnnnnnnnnnnnnnnnnnnnnnnnnnnnnnnnnnnnnnnnnnnnnnnnnnnnnnnnnnnnnnnnnnnnnnnnnnnnnnnnnnnnnnnnnnnnnnnnnnnnnnnnnnnnnnnnnnnnnnnnnnnnnnnnnnnnnnnnnnnnnnnnnnnnnnnnnnnnnnnnnnnnnnnnnnnnnnnnnnnnnnnnnnnnnnnnnnnnnnnnnnnnnnnnnnnnnnnnnnnnnnnnnnnnnnnnnnnnnnnnnnnnnnnnnnnnnnnnnnnnnnnnnnnnnnnnnnnnnnnnnnnnnnnnnnnnnnnnnnnnnnnnnnnnnnnnnnnnnnnnnnnnnnnnnnnnnnnnnnnnnnnnnnnnnnnnnnnnnnnnnnnnnnnnnnnnnnnnnnnnnnnnnnnnnnnnnnnnnnnnnnnnnnnnnnnnnnnnnnnnnnnnnnnnnnnnnnnnnnnnnnnnnnnnnnnnnnnnnnnnnnnnnnnnnnnnnnnnnnnnnnnnnnnnnnnnnnnnnnnnnnnnnnnnnnnnnnnnnnnnnnnnnnnnnnnnnnnnnnnnnnnnnnnnnnnnnnnnnnnnnnnnnnnnnnnnnnnnnnnnnnnnnnnnnnnnnnnnnnnnnnnnnnnnnnnnnnnnnnnnnnnnnnnnnnnnnnnnnnnnnnnnnnnnnnnnnnnnnnnnnnnnnnnnnnnnnnnnnnnnnnnnnnnnnnnnnnnnnnnnnnnnnnnnnnnnnnnnnnnnnnnnnnnnnnnnnnnnnnnnnnnnnnnnnnnnnnnnnnnnnnnnnnnnnnnnnnnnnnnnnnnnnnnnnnnnnnnnnnnnnnnnnnnnnnnnnnnnnnnnnnnnnnnnnnnnnnnnnnnnnnnnnnnnnnnnnnnnnnnnnnnnnnnnnnnnnnnnnnnnnnnnnnnnnnnnnnnnnnnnnnnnnnnnnnnnnnnnnnnnnnnnnnnnnnnnnnnnnnnnnnnnnnnnnnnnnnnnnnnnnnnnnnnnnnnnnnnnnnnnnnnnnnnnnnnnnnnnnnnnnnnnnnnnnnnnnnnnnnnnnnnnnnnnnnnnnnnnnnnnnnnnnnnnnnnnnnnnnnnnnnnnnnnnnnnnnnnnnnnnnnnnnnnnnnnnnnnnnnnnnnnnnnnnnnnnnnnnnnnnnnnnnnnnnnnnnnnnnnnnnnnnnnnnnnnnnnnnnnnnnnnnnnnnnnnnnnnnnnnnnnnnnnnnnnnnnnnnnnnnnnnnnnnnnnnnnnnnnnnnnnnnnnnnnnnnnnnnnnnnnnnnnnnnnnnnnnnnnnnnnnnnnnnnnnnnnnnnnnnnnnnnnnnnnnnnnnnnnnnnnnnnnnnnnnnnnnnnnnnnnnnnnnnnnnnnnnnnnnnnnnnnnnnnnnnnnnnnnnnnnnnnnnnnnnnnnnnnnnnnnnnnnnnnnnnnnnnnnnnnnnnnnnnnnnnnnnnnnnnnnnnnnnnnnnnnnnnnnnnnnnnnnnnnnnnnnnnnnnnnnnnnnnnnnnnnnnnnnnnnnnnnnnnnnnnnnnnnnnnnnnnnnnnnnnnnnnnnnnnnnnnnnnnnnnnnnnnnnnnnnnnnnnnnnnnnnnnnnnnnnnnnnnnnnnnnnnnnnnnnnnnnnnnnnnnnnnnnnnnnnnnnnnnnnnnnnnnnnnnnnnnnnnnnnnnnnnnnnnnnnnnnnnnnnnnnnnnnnnnnnnnnnnnnnnnnnnnnnnnnnnnnnnnnnnnnnnnnnnnnnnnnnnnnnnnnnnnnnnnnnnnnnnnnnnnnnnnnnnnnnnnnnnnnnnnnnnnnnnnnnnnnnnnnnnnnnnnnnnnnnnnnnnnnnnnnnnnnnnnnnnnnnnnnnnnnnnnnnnnnnnnnnnnnnnnnnnnnnnnnnnnnnnnnnnnnnnnnnnnnnnnnnnnnnnnnnnnnnnnnnnnnnnnnnnnnnnnnnnnnnnnnnnnnnnnnnnnnnnnnnnnnnnnnnnnnnnnnnnnnnnnnnnnnnnnnnnnnnnnnnnnnnnnnnnnnnnnnnnnnnnnnnnnnnnnnnnnnnnnnnnnnnnnnnnnnnnnnnnnnnnnnnnnnnnnnnnnnnnnnnnnnnnnnnnnnnnnnnnnnnnnnnnnnnnnnnnnnnnnnnnnnnnnnnnnnnnnnnnnnnnnnnnnnnnnnnnnnnnnnnnnnnnnnnnnnnnnnnnnnnnnnnnnnnnnnnnnnnnnnnnnnnnnnnnnnnnnnnnnnnnnnnnnnnnnnnnnnnnnnnnnnnnnnnnnnnnnnnnnnnnnnnnnnnnnnnnnnnnnnnnnnnnnnnnnnnnnnnnnnnnnnnnnnnnnnnnnnnnnnnnnnnnnnnnnnnnnnnnnnnnnnnnnnnnnnnnnnnnnnnnnnnnnnnnnnnnnnnnnnnnnnnnnnnnnnnnnnnnnnnnnnnnnnnnnnnnnnnnnnnnnnnnnnnnnnnnnnnnnnnnnnnnnnnnnnnnnnnnnnnnnnnnnnnnnnnnnnnnnnnnnnnnnnnnnnnnnnnnnnnnnnnnnnnnnnnnnnnnnnnnnnnnnnnnnnnnnnnnnnnnnnnnnnnnnnnnnnnnnnnnnnnnnnnnnnnnnnnnnnnnnnnnnnnnnnnnnnnnnnnnnnnnnnnnnnnnnnnnnnnnnnnnnnnnnnnnnnnnnnnnnnnnnnnnnnnnnnnnnnnnnnnnnnnnnnnnnnnnnnnnnnnnnnnnnnnnnnnnnnnnnnnnnnnnnnnnnnnnnnnnnnnnnnnnnnnnnnnnnnnnnnnnnnnnnnnnnnnnnnnnnnnnnnnnnnnnnnnnnnnnnnnnnnnnnnnnnnnnnnnnnnnnnnnnnnnnnnnnnnnnnnnnnnnnnnnnnnnnnnnnnnnnnnnnnnnnnnnnnnnnnnnnnnnnnnnnnnnnnnnnnnnnnnnnnnnnnnnnnnnnnnnnnnnnnnnnnnnnnnnnnnnnnnnnnnnnnnnnnnnnnnnnnnnnnnnnnnnnnnnnnnnnnnnnnnnnnnnnnnnnnnnnnnnnnnnnnnnnnnnnnnnnnnnnnnnnnnnnnnnnnnnnnnnnnnnnnnnnnnnnnnnnnnnnnnnnnnnnnnnnnnnnnnnnnnnnnnnnnnnnnnnnnnnnnnnnnnnnnnnnnnnnnnnnnnnnnnnnnnnnnnnnnnnnnnnnnnnnnnnnnnnnnnnnnnnnnnnnnnnnnnnnnnnnnnnnnnnnnnnnnnnnnnnnnnnnnnnnnnnnnnnnnnnnnnnnnnnnnnnnnnnnnnnnnnnnnnnnnnnnnnnnnnnnnnnnnnnnnnnnnnnnnnnnnnnnnnnnnnnnnnnnnnnnnnnnnnnnnnnnnnnnnnnnnnnnnnnnnnnnnnnnnnnnnnnnnnnnnnnnnnnnnnnnnnnnnnnnnnnnnnnnnnnnnnnnnnnnnnnnnnnnnnnnnnnnnnnnnnnnnnnnnnnnnnnnnnnnnnnnnnnnnnnnnnnnnnnnnnnnnnnnnnnnnnnnnnnnnnnnnnnnnnnnnnnnnnnnnnnnnnnnnnnnnnnnnnnnnnnnnnnnnnnnnnnnnnnnnnnnnnnnnnnnnnnnnnnnnnnnnnnnnnnnnnnnnnnnnnnnnnnnnnnnnnnnnnnnnnnnnnnnnnnnnnnnnnnnnnnnnnnnnnnnnnnnnnnnnnnnnnnnnnnnnnnnnnnnnnnnnnnnnnnnnnnnnnnnnnnnnnnnnnnnnnnnnnnnnnnnnnnnnnnnnnnnnnnnnnnnnnnnnnnnnnnnnnnnnnnnnnnnnnnnnnnnnnnnnnnnnnnnnnnnnnnnnnnnnnnnnnnnnnnnnnnnnnnnnnnnnnnnnnnnnnnnnnnnnnnnnnnnnnnnnnnnnnnnnnnnnnnnnnnnnnnnnnnnnnnnnnnnnnnnnnnnnnnnnnnnnnnnnnnnnnnnnnnnnnnnnnnnnnnnnnnnnnnnnnnnnnnnnnnnnnnnnnnnnnnnnnnnnnnnnnnnnnnnnnnnnnnnnnnnnnnnnnnnnnnnnnnnnnnnnnnnnnnnnnnnnnnnnnnnnnnnnnnnnnnnnnnnnnnnnnnnnnnnnnnnnnnnnnnnnnnnnnnnnnnnnnnnnnnnnnnnnnnnnnnnnnnnnnnnnnnnnnnnnnnnnnnnnnnnnnnnnnnnnnnnnnnnnnnnnnnnnnnnnnnnnnnnnnnnnnnnnnnnnnnnnnnnnnnnnnnnnnnnnnnnnnnnnnnnnnnnnnnnnnnnnnnnnnnnnnnnnnnnnnnnnnnnnnnnnnnnnnnnnnnnnnnnnnnnnnnnnnnnnnnnnnnnnnnnnnnnnnnnnnnnnnnnnnnnnnnnnnnnnnnnnnnnnnnnnnnnnnnnnnnnnnnnnnnnnnnnnnnnnnnnnnnnnnnnnnnnnnnnnnnnnnnnnnnnnnnnnnnnnnnnnnnnnnnnnnnnnnnnnnnnnnnnnnnnnnnnnnnnnnnnnnnnnnnnnnnnnnnnnnnnnnnnnnnnnnnnnnnnnnnnnnnnnnnnnnnnnnnnnnnnnnnnnnnnnnnnnnnnnnnnnnnnnnnnnnnnnnnnnnnnnnnnnnnnnnnnnnnnnnnnnnnnnnnnnnnnnnnnnnnnnnnnnnnnnnnnnnnnnnnnnnnnnnnnnnnnnnnnnnnnnnnnnnnnnnnnnnnnnnnnnnnnnnnnnnnnnnnnnnnnnnnnnnnnnnnnnnnnnnnnnnnnnnnnnnnnnnnnnnnnnnnnnnnnnnnnnnnnnnnnnnnnnnnnnnnnnnnnnnnnnnnnnnnnnnnnnnnnnnnnnnnnnnnnnnnnnnnnnnnnnnnnnnnnnnnnnnnnnnnnnnnnnnnnnnnnnnnnnnnnnnnnnnnnnnnnnnnnnnnnnnnnnnnnnnnnnnnnnnnnnnnnnnnnnnnnnnnnnnnnnnnnnnnnnnnnnnnnnnnnnnnnnnnnnnnnnnnnnnnnnnnnnnnnnnnnnnnnnnnnnnnnnnnnnnnnnnnnnnnnnnnnnnnnnnnnnnnnnnnnnnnnnnnnnnnnnnnnnnnnnnnnnnnnnnnnnnnnnnnnnnnnnnnnnnnnnnnnnnnnnnnnnnnnnnnnnnnnnnnnnnnnnnnnnnnnnnnnnnnnnnnnnnnnnnnnnnnnnnnnnnnnnnnnnnnnnnnnnnnnnnnnnnnnnnnnnnnnnnnnnnnnnnnnnnnnnnnnnnnnnnnnnnnnnnnnnnnnnnnnnnnnnnnnnnnnnnnnnnnnnnnnnnnnnnnnnnnnnnnnnnnnnnnnnnnnnnnnnnnnnnnnnnnnnnnnnnnnnnnnnnnnnnnnnnnnnnnnnnnnnnnnnnnnnnnnnnnnnnnnnnnnnnnnnnnnnnnnnnnnnnnnnnnnnnnnnnnnnnnnnnnnnnnnnnnnnnnnnnnnnnnnnnnnnnnnnnnnnnnnnnnnnnnnnnnnnnnnnnnnnnnnnnnnnnnnnnnnnnnnnnnnnnnnnnnnnnnnnnnnnnnnnnnnnnnnnnnnnnnnnnnnnnnnnnnnnnnnnnnnnnnnnnnnnnnnnnnnnnnnnnnnnnnnnnnnnnnnnnnnnnnnnnnnnnnnnnnnnnnnnnnnnnnnnnnnnnnnnnnnnnnnnnnnnnnnnnnnnnnnnnnnnnnnnnnnnnnnnnnnnnnnnnnnnnnnnnnnnnnnnnnnnnnnnnnnnnnnnnnnnnnnnnnnnnnnnnnnnnnnnnnnnnnnnnnnnnnnnnnnnnnnnnnnnnnnnnnnnnnnnnnnnnnnnnnnnnnnnnnnnnnnnnnnnnnnnnnnnnnnnnnnnnnnnnnnnnnnnnnnnnnnnnnnnnnnnnnnnnnnnnnnnnnnnnnnnnnnnnnnnnnnnnnnnnnnnnnnnnnnnnnnnnnnnnnnnnnnnnnnnnnnnnnnnnnnnnnnnnnnnnnnnnnnnnnnnnnnnnnnnnnnnnnnnnnnnnnnnnnnnnnnnnnnnnnnnnnnnnnnnnnnnnnnnnnnnnnnnnnnnnnnnnnnnnnnnnnnnnnnnnnnnnnnnnnnnnnnnnnnnnnnnnnnnnnnnnnnnnnnnnnnnnnnnnnnnnnnnnnnnnnnnnnnnnnnnnnnnnnnnnnnnnnnnnnnnnnnnnnnnnnnnnnnnnnnnnnnnnnnnnnnnnnnnnnnnnnnnnnnnnnnnnnnnnnnnnnnnnnnnnnnnnnnnnnnnnnnnnnnnnnnnnnnnnnnnnnnnnnnnnnnnnnnnnnnnnnnnnnnnnnnnnnnnnnnnnnnnnnnnnnnnnnnnnnnnnnnnnnnnnnnnnnnnnnnnnnnnnnnnnnnnnnnnnnnnnnnnnnnnnnnnnnnnnnnnnnnnnnnnnnnnnnnnnnnnnnnnnnnnnnnnnnnnnnnnnnnnnnnnnnnnnnnnnnnnnnnnnnnnnnnnnnnnnnnnnnnnnnnnnnnnnnnnnnnnnnnnnnnnnnnnnnnnnnnnnnnnnnnnnnnnnnnnnnnnnnnnnnnnnnnnnnnnnnnnnnnnnnnnnnnnnnnnnnnnnnnnnnnnnnnnnnnnnnnnnnnnnnnnnnnnnnnnnnnnnnnnnnnnnnnnnnnnnnnnnnnnnnnnnnnnnnnnnnnnnnnnnnnnnnnnnnnnnnnnnnnnnnnnnnnnnnnnnnnnnnnnnnnnnnnnnnnnnnnnnnnnnnnnnnnnnnnnnnnnnnnnnnnnnnnnnnnnnnnnnnnnnnnnnnnnnnnnnnnnnnnnnnnnnnnnnnnnnnnnnnnnnnnnnnnnnnnnnnnnnnnnnnnnnnnnnnnnnnnnnnnnnnnnnnnnnnnnnnnnnnnnnnnnnnnnnnnnnnnnnnnnnnnnnnnnnnnnnnnnnnnnnnnnnnnnnnnnnnnnnnnnnnnnnnnnnnnnnnnnnnnnnnnnnnnnnnnnnnnnnnnnnnnnnnnnnnnnnnnnnnnnnnnnnnnnnnnnnnnnnnnnnnnnnnnnnnnnnnnnnnnnnnnnnnnnnnnnnnnnnnnnnnnnnnnnnnnnnnnnnnnnnnnnnnnnnnnnnnnnnnnnnnnnnnnnnnnnnnnnnnnnnnnnnnnnnnnnnnnnnnnnnnnnnnnnnnnnnnnnnnnnnnnnnnnnnnnnnnnnnnnnnnnnnnnnnnnnnnnnnnnnnnnnnnnnnnnnnnnnnnnnnnnnnnnnnnnnnnnnnnnnnnnnnnnnnnnnnnnnnnnnnnnnnnnnnnnnnnnnnnnnnnnnnnnnnnnnnnnnnnnnnnnnnnnnnnnnnnnnnnnnnnnnnnnnnnnnnnnnnnnnnnnnnnnnnnnnnnnnnnnnnnnnnnnnnnnnnnnnnnnnnnnnnnnnnnnnnnnnnnnnnnnnnnnnnnnnnnnnnnnnnnnnnnnnnnnnnnnnnnnnnnnnnnnnnnnnnnnnnnnnnnnnnnnnnnnnnnnnnnnnnnnnnnnnnnnnnnnnnnnnnnnnnnnnnnnnnnnnnnnnnnnnnnnnnnnnnnnnnnnnnnnnnnnnnnnnnnnnnnnnnnnnnnnnnnnnnnnnnnnnnnnnnnnnnnnnnnnnnnnnnnnnnnnnnnnnnnnnnnnnnnnnnnnnnnnnnnnnnnnnnnnnnnnnnnnnnnnnnnnnnnnnnnnnnnnnnnnnnnnnnnnnnnnnnnnnnnnnnnnnnnnnnnnnnnnnnnnnnnnnnnnnnnnnnnnnnnnnnnnnnnnnnnnnnnnnnnnnnnnnnnnnnnnnnnnnnnnnnnnnnnnnnnnnnnnnnnnnnnnnnnnnnnnnnnnnnnnnnnnnnnnnnnnnnnnnnnnnnnnnnnnnnnnnnnnnnnnnnnnnnnnnnnnnnnnnnnnnnnnnnnnnnnnnnnnnnnnnnnnnnnnnnnnnnnnnnnnnnnnnnnnnnnnnnnnnnnnnnnnnnnnnnnnnnnnnnnnnnnnnnnnnnnnnnnnnnnnnnnnnnnnnnnnnnnnnnnnnnnnnnnnnnnnnnnnnnnnnnnnnnnnnnnnnnnnnnnnnnnnnnnnnnnnnnnnnnnnnnnnnnnnnnnnnnnnnnnnnnnnnnnnnnnnnnnnnnnnnnnnnnnnnnnnnnnnnnnnnnnnnnnnnnnnnnnnnnnnnnnnnnnnnnnnnnnnnnnnnnnnnnnnnnnnnnnnnnnnnnnnnnnnnnnnnnnnnnnnnnnnnnnnnnnnnnnnnnnnnnnnnnnnnnnnnnnnnnnnnnnnnnnnnnnnnnnnnnnnnnnnnnnnnnnnnnnnnnnnnnnnnnnnnnnnnnnnnnnnnnnnnnnnnnnnnnnnnnnnnnnnnnnnnnnnnnnnnnnnnnnnnnnnnnnnnnnnnnnnnnnnnnnnnnnnnnnnnnnnnnnnnnnnnnnnnnnnnnnnnnnnnnnnnnnnnnnnnnnnnnnnnnnnnnnnnnnnnnnnnnnnnnnnnnnnnnnnnnnnnnnnnnnnnnnnnnnnnnnnnnnnnnnnnnnnnnnnnnnnnnnnnnnnnnnnnnnnnnnnnnnnnnnnnnnnnnnnnnnnnnnnnnnnnnnnnnnnnnnnnnnnnnnnnnnnnnnnnnnnnnnnnnnnnnnnnnnnnnnnnnnnnnnnnnnnnnnnnnnnnnnnnnnnnnnnnnnnnnnnnnnnnnnnnnnnnnnnnnnnnnnnnnnnnnnnnnnnnnnnnnnnnnnnnnnnnnnnnnnnnnnnnnnnnnnnnnnnnnnnnnnnnnnnnnnnnnnnnnnnnnnnnnnnnnnnnnnnnnnnnnnnnnnnnnnnnnnnnnnnnnnnnnnnnnnnnnnnnnnnnnnnnnnnnnnnnnnnnnnnnnnnnnnnnnnnnnnnnnnnnnnnnnnnnnnnnnnnnnnnnnnnnnnnnnnnnnnnnnnnnnnnnnnnnnnnnnnnnnnnnnnnnnnnnnnnnnnnnnnnnnnnnnnnnnnnnnnnnnnnnnnnnnnnnnnnnnnnnnnnnnnnnnnnnnnnnnnnnnnnnnnnnnnnnnnnnnnnnnnnnnnnnnnnnnnnnnnnnnnnnnnnnnnnnnnnnnnnnnnnnnnnnnnnnnnnnnnnnnnnnnnnnnnnnnnnnnnnnnnnnnnnnnnnnnnnnnnnnnnnnnnnnnnnnnnnnnnnnnnnnnnnnnnnnnnnnnnnnnnnnnnnnnnnnnnnnnnnnnnnnnnnnnnnnnnnnnnnnnnnnnnnnnnnnnnnnnnnnnnnnnnnnnnnnnnnnnnnnnnnnnnnnnnnnnnnnnnnnnnnnnnnnnnnnnnnnnnnnnnnnnnnnnnnnnnnnnnnnnnnnnnnnnnnnnnnnnnnnnnnnnnnnnnnnnnnnnnnnnnnnnnnnnnnnnnnnnnnnnnnnnnnnnnnnnnnnnnnnnnnnnnnnnnnnnnnnnnnnnnnnnnnnnnnnnnnnnnnnnnnnnnnnnnnnnnnnnnnnnnnnnnnnnnnnnnnnnnnnnnnnnnnnnnnnnnnnnnnnnnnnnnnnnnnnnnnnnnnnnnnnnnnnnnnnnnnnnnnnnnnnnnnnnnnnnnnnnnnnnnnnnnnnnnnnnnnnnnnnnnnnnnnnnnnnnnnnnnnnnnnnnnnnnnnnnnnnnnnnnnnnnnnnnnnnnnnnnnnnnnnnnnnnnnnnnnnnnnnnnnnnnnnnnnnnnnnnnnnnnnnnnnnnnnnnnnnnnnnnnnnnnnnnnnnnnnnnnnnnnnnnnnnnnnnnnnnnnnnnnnnnnnnnnnnnnnnnnnnnnnnnnnnnnnnnnnnnnnnnnnnnnnnnnnnnnnnnnnnnnnnnnnnnnnnnnnnnnnnnnnnnnnnnnnnnnnnnnnnnnnnnnnnnnnnnnnnnnnnnnnnnnnnnnnnnnnnnnnnnnnnnnnnnnnnnnnnnnnnnnnnnnnnnnnnnnnnnnnnnnnnnnnnnnnnnnnnnnnnnnnnnnnnnnnnnnnnnnnnnnnnnnnnnnnnnnnnnnnnnnnnnnnnnnnnnnnnnnnnnnnnnnnnnnnnnnnnnnnnnnnnnnnnnnnnnnnnnnnnnnnnnnnnnnnnnnnnnnnnnnnnnnnnnnnnnnnnnnnnnnnnnnnnnnnnnnnnnnnnnnnnnnnnnnnnnnnnnnnnnnnnnnnnnnnnnnnnnnnnnnnnnnnnnnnnnnnnnnnnnnnnnnnnnnnnnnnnnnnnnnnnnnnnnnnnnnnnnnnnnnnnnnnnnnnnnnnnnnnnnnnnnnnnnnnnnnnnnnnnnnnnnnnnnnnnnnnnnnnnnnnnnnnnnnnnnnnnnnnnnnnnnnnnnnnnnnnnnnnnnnnnnnnnnnnnnnnnnnnnnnnnnnnnnnnnnnnnnnnnnnnnnnnnnnnnnnnnnnnnnnnnnnnnnnnnnnnnnnnnnnnnnnnnnnnnnnnnnnnnnnnnnnnnnnnnnnnnnnnnnnnnnnnnnnnnnnnnnnnnnnnnnnnnnnnnnnnnnnnnnnnnnnnnnnnnnnnnnnnnnnnnnnnnnnnnnnnnnnnnnnnnnnnnnnnnnnnnnnnnnnnnnnnnnnnnnnnnnnnnnnnnnnnnnnnnnnnnnnnnnnnnnnnnnnnnnnnnnnnnnnnnnnnnnnnnnnnnnnnnnnnnnnnnnnnnnnnnnnnnnnnnnnnnnnnnnnnnnnnnnnnnnnnnnnnnnnnnnnnnnnnnnnnnnnnnnnnnnnnnnnnnnnnnnnnnnnnnnnnnnnnnnnnnnnnnnnnnnnnnnnnnnnnnnnnnnnnnnnnnnnnnnnnnnnnnnnnnnnnnnnnnnnnnnnnnnnnnnnnnnnnnnnnnnnnnnnnnnnnnnnnnnnnnnnnnnnnnnnnnnnnnnnnnnnnnnnnnnnnnnnnnnnnnnnnnnnnnnnnnnnnnnnnnnnnnnnnnnnnnnnnnnnnnnnnnnnnnnnnnnnnnnnnnnnnnnnnnnnnnnnnnnnnnnnnnnnnnnnnnnnnnnnnnnnnnnnnnnnnnnnnnnnnnnnnnnnnnnnnnnnnnnnnnnnnnnnnnnnnnnnnnnnnnnnnnnnnnnnnnnnnnnnnnnnnnnnnnnnnnnnnnnnnnnnnnnnnnnnnnnnnnnnnnnnnnnnnnnnnnnnnnnnnnnnnnnnnnnnnnnnnnnnnnnnnnnnnnnnnnnnnnnnnnnnnnnnnnnnnnnnnnnnnnnnnnnnnnnnnnnnnnnnnnnnnnnnnnnnnnnnnnnnnnnnnnnnnnnnnnnnnnnnnnnnnnnnnnnnnnnnnnnnnnnnnnnnnnnnnnnnnnnnnnnnnnnnnnnnnnnnnnnnnnnnnnnnnnnnnnnnnnnnnnnnnnnnnnnnnnnnnnnnnnnnnnnnnnnnnnnnnnnnnnnnnnnnnnnnnnnnnnnnnnnnnnnnnnnnnnnnnnnnnnnnnnnnnnnnnnnnnnnnnnnnnnnnnnnnnnnnnnnnnnnnnnnnnnnnnnnnnnnnnnnnnnnnnnnnnnnnnnnnnnnnnnnnnnnnnnnnnnnnnnnnnnnnnnnnnnnnnnnnnnnnnnnnnnnnnnnnnnnnnnnnnnnnnnnnnnnnnnnnnnnnnnnnnnnnnnnnnnnnnnnnnnnnnnnnnnnnnnnnnnnnnnnnnnnnnnnnnnnnnnnnnnnnnnnnnnnnnnnnnnnnnnnnnnnnnnnnnnnnnnnnnnnnnnnnnnnnnnnnnnnnnnnnnnnnnnnnnnnnnnnnnnnnnnnnnnnnnnnnnnnnnnnnnnnnnnnnnnnnnnnnnnnnnnnnnnnnnnnnnnnnnnnnnnnnnnnnnnnnnnnnnnnnnnnnnnnnnnnnnnnnnnnnnnnnnnnnnnnnnnnnnnnnnnnnnnnnnnnnnnnnnnnnnnnnnnnnnnnnnnnnnnnnnnnnnnnnnnnnnnnnnnnnnnnnnnnnnnnnnnnnnnnnnnnnnnnnnnnnnnnnnnnnnnnnnnnnnnnnnnnnnnnnnnnnnnnnnnnnnnnnnnnnnnnnnnnnnnnnnnnnnnnnnnnnnnnnnnnnnnnnnnnnnnnnnnnnnnnnnnnnnnnnnnnnnnnnnnnnnnnnnnnnnnnnnnnnnnnnnnnnnnnnnnnnnnnnnnnnnnnnnnnnnnnnnnnnnnnnnnnnnnnnnnnnnnnnnnnnnnnnnnnnnnnnnnnnnnnnnnnnnnnnnnnnnnnnnnnnnnnnnnnnnnnnnnnnnnnnnnnnnnnnnnnnnnnnnnnnnnnnnnnnnnnnnnnnnnnnnnnnnnnnnnnnnnnnnnnnnnnnnnnnnnnnnnnnnnnnnnnnnnnnnnnnnnnnnnnnnnnnnnnnnnnnnnnnnnnnnnnnnnnnnnnnnnnnnnnnnnnnnnnnnnnnnnnnnnnnnnnnnnnnnnnnnnnnnnnnnnnnnnnnnnnnnnnnnnnnnnnnnnnnnnnnnnnnnnnnnnnnnnnnnnnnnnnnnnnnnnnnnnnnnnnnnnnnnnnnnnnnnnnnnnnnnnnnnnnnnnnnnnnnnnnnnnnnnnnnnnnnnnnnnnnnnnnnnnnnnnnnnnnnnnnnnnnnnnnnnnnnnnnnnnnnnnnnnnnnnnnnnnnnnnnnnnnnnnnnnnnnnnnnnnnnnnnnnnnnnnnnnnnnnnnnnnnnnnnnnnnnnnnnnnnnnnnnnnnnnnnnnnnnnnnnnnnnnnnnnnnnnnnnnnnnnnnnnnnnnnnnnnnnnnnnnnnnnnnnnnnnnnnnnnnnnnnnnnnnnnnnnnnnnnnnnnnnnnnnnnnnnnnnnnnnnnnnnnnnnnnnnnnnnnnnnnnnnnnnnnnnnnnnnnnnnnnnnnnnnnnnnnnnnnnnnnnnnnnnnnnnnnnnnnnnnnnnnnnnnnnnnnnnnnnnnnnnnnnnnnnnnnnnnnnnnnnnnnnnnnnnnnnnnnnnnnnnnnnnnnnnnnnnnnnnnnnnnnnnnnnnnnnnnnnnnnnnnnnnnnnnnnnnnnnnnnnnnnnnnnnnnnnnnnnnnnnnnnnnnnnnnnnnnnnnnnnnnnnnnnnnnnnnnnnnnnnnnnnnnnnnnnnnnnnnnnnnnnnnnnnnnnnnnnnnnnnnnnnnnnnnnnnnnnnnnnnnnnnnnnnnnnnnnnnnnnnnnnnnnnnnnnnnnnnnnnnnnnnnnnnnnnnnnnnnnnnnnnnnnnnnnnnnnnnnnnnnnnnnnnnnnnnnnnnnnnnnnnnnnnnnnnnnnnnnnnnnnnnnnnnnnnnnnnnnnnnnnnnnnnnnnnnnnnnnnnnnnnnnnnnnnnnnnnnnnnnnnnnnnnnnnnnnnnnnnnnnnnnnnnnnnnnnnnnnnnnnnnnnnnnnnnnnnnnnnnnnnnnnnnnnnnnnnnnnnnnnnnnnnnnnnnnnnnnnnnnnnnnnnnnnnnnnnnnnnnnnnnnnnnnnnnnnnnnnnnnnnnnnnnnnnnnnnnnnnnnnnnnnnnnnnnnnnnnnnnnnnnnnnnnnnnnnnnnnnnnnnnnnnnnnnnnnnnnnnnnnnnnnnnnnnnnnnnnnnnnnnnnnnnnnnnnnnnnnnnnnnnnnnnnnnnnnnnnnnnnnnnnnnnnnnnnnnnnnnnnnnnnnnnnnnnnnnnnnnnnnnnnnnnnnnnnnnnnnnnnnnnnnnnnnnnnnnnnnnnnnnnnnnnnnnnnnnnnnnnnnnnnnnnnnnnnnnnnnnnnnnnnnnnnnnnnnnnnnnnnnnnnnnnnnnnnnnnnnnnnnnnnnnnnnnnnnnnnnnnnnnnnnnnnnnnnnnnnnnnnnnnnnnnnnnnnnnnnnnnnnnnnnnnnnnnnnnnnnnnnnnnnnnnnnnnnnnnnnnnnnnnnnnnnnnnnnnnnnnnnnnnnnnnnnnnnnnnnnnnnnnnnnnnnnnnnnnnnnnnnnnnnnnnnnnnnnnnnnnnnnnnnnnnnnnnnnnnnnnnnnnnnnnnnnnnnnnnnnnnnnnnnnnnnnnnnnnnnnnnnnnnnnnnnnnnnnnnnnnnnnnnnnnnnnnnnnnnnnnnnnnnnnnnnnnnnnnnnnnnnnnnnnnnnnnnnnnnnnnnnnnnnnnnnnnnnnnnnnnnnnnnnnnnnnnnnnnnnnnnnnnnnnnnnnnnnnnnnnnnnnnnnnnnnnnnnnnnnnnnnnnnnnnnnnnnnnnnnnnnnnnnnnnnnnnnnnnnnnnnnnnnnnnnnnnnnnnnnnnnnnnnnnnnnnnnnnnnnnnnnnnnnnnnnnnnnnnnnnnnnnnnnnnnnnnnnnnnnnnnnnnnnnnnnnnnnnnnnnnnnnnnnnnnnnnnnnnnnnnnnnnnnnnnnnnnnnnnnnnnnnnnnnnnnnnnnnnnnnnnnnnnnnnnnnnnnnnnnnnnnnnnnnnnnnnnnnnnnnnnnnnnnnnnnnnnnnnnnnnnnnnnnnnnnnnnnnnnnnnnnnnnnnnnnnnnnnnnnnnnnnnnnnnnnnnnnnnnnnnnnnnnnnnnnnnnnnnnnnnnnnnnnnnnnnnnnnnnnnnnnnnnnnnnnnnnnnnnnnnnnnnnnnnnnnnnnnnnnnnnnnnnnnnnnnnnnnnnnnnnnnnnnnnnnnnnnnnnnnnnnnnnnnnnnnnnnnnnnnnnnnnnnnnnnnnnnnnnnnnnnnnnnnnnnnnnnnnnnnnnnnnnnnnnnnnnnnnnnnnnnnnnnnnnnnnnnnnnnnnnnnnnnnnnnnnnnnnnnnnnnnnnnnnnnnnnnnnnnnnnnnnnnnnnnnnnnnnnnnnnnnnnnnnnnnnnnnnnnnnnnnnnnnnnnnnnnnnnnnnnnnnnnnnnnnnnnnnnnnnnnnnnnnnnnnnnnnnnnnnnnnnnnnnnnnnnnnnnnnnnnnnnnnnnnnnnnnnnnnnnnnnnnnnnnnnnnnnnnnnnnnnnnnnnnnnnnnnnnnnnnnnnnnnnnnnnnnnnnnnnnnnnnnnnnnnnnnnnnnnnnnnnnnnnnnnnnnnnnnnnnnnnnnnnnnnnnnnnnnnnnnnnnnnnnnnnnnnnnnnnnnnnnnnnnnnnnnnnnnnnnnnnnnnnnnnnnnnnnnnnnnnnnnnnnnnnnnnnnnnnnnnnnnnnnnnnnnnnnnnnnnnnnnnnnnnnnnnnnnnnnnnnnnnnnnnnnnnnnnnnnnnnnnnnnnnnnnnnnnnnnnnnnnnnnnnnnnnnnnnnnnnnnnnnnnnnnnnnnnnnnnnnnnnnnnnnnnnnnnnnnnnnnnnnnnnnnnnnnnnnnnnnnnnnnnnnnnnnnnnnnnnnnnnnnnnnnnnnnnnnnnnnnnnnnnnnnnnnnnnnnnnnnnnnnnnnnnnnnnnnnnnnnnnnnnnnnnnnnnnnnnnnnnnnnnnnnnnnnnnnnnnnnnnnnnnnnnnnnnnnnnnnnnnnnnnnnnnnnnnnnnnnnnnnnnnnnnnnnnnnnnnnnnnnnnnnnnnnnnnnnnnnnnnnnnnnnnnnnnnnnnnnnnnnnnnnnnnnnnnnnnnnnnnnnnnnnnnnnnnnnnnnnnnnnnnnnnnnnnnnnnnnnnnnnnnnnnnnnnnnnnnnnnnnnnnnnnnnnnnnnnnnnnnnnnnnnnnnnnnnnnnnnnnnnnnnnnnnnnnnnnnnnnnnnnnnnnnnnnnnnnnnnnnnnnnnnnnnnnnnnnnnnnnnnnnnnnnnnnnnnnnnnnnnnnnnnnnnnnnnnnnnnnnnnnnnnnnnnnnnnnnnnnnnnnnnnnnnnnnnnnnnnnnnnnnnnnnnnnnnnnnnnnnnnnnnnnnnnnnnnnnnnnnnnnnnnnnnnnnnnnnnnnnnnnnnnnnnnnnnnnnnnnnnnnnnnnnnnnnnnnnnnnnnnnnnnnnnnnnnnnnnnnnnnnnnnnnnnnnnnnnnnnnnnnnnnnnnnnnnnnnnnnnnnnnnnnnnnnnnnnnnnnnnnnnnnnnnnnnnnnnnnnnnnnnnnnnnnnnnnnnnnnnnnnnnnnnnnnnnnnnnnnnnnnnnnnnnnnnnnnnnnnnnnnnnnnnnnnnnnnnnnnnnnnnnnnnnnnnnnnnnnnnnnnnnnnnnnnnnnnnnnnnnnnnnnnnnnnnnnnnnnnnnnnnnnnnnnnnnnnnnnnnnnnnnnnnnnnnnnnnnnnnnnnnnnnnnnnnnnnnnnnnnnnnnnnnnnnnnnnnnnnnnnnnnnnnnnnnnnnnnnnnnnnnnnnnnnnnnnnnnnnnnnnnnnnnnnnnnnnnnnnnnnnnnnnnnnnnnnnnnnnnnnnnnnnnnnnnnnnnnnnnnnnnnnnnnnnnnnnnnnnnnnnnnnnnnnnnnnnnnnnnnnnnnnnnnnnnnnnnnnnnnnnnnnnnnnnnnnnnnnnnnnnnnnnnnnnnnnnnnnnnnnnnnnnnnnnnnnnnnnnnnnnnnnnnnnnnnnnnnnnnnnnnnnnnnnnnnnnnnnnnnnnnnnnnnnnnnnnnnnnnnnnnnnnnnnnnnnnnnnnnnnnnnnnnnnnnnnnnnnnnnnnnnnnnnnnnnnnnnnnnnnnnnnnnnnnnnnnnnnnnnnnnnnnnnnnnnnnnnnnnnnnnnnnnnnnnnnnnnnnnnnnnnnnnnnnnnnnnnnnnnnnnnnnnnnnnnnnnnnnnnnnnnnnnnnnnnnnnnnnnnnnnnnnnnnnnnnnnnnnnnnnnnnnnnnnnnnnnnnnnnnnnnnnnnnnnnnnnnnnnnnnnnnnnnnnnnnnnnnnnnnnnnnnnnnnnnnnnnnnnnnnnnnnnnnnnnnnnnnnnnnnnnnnnnnnnnnnnnnnnnnnnnnnnnnnnnnnnnnnnnnnnnnnnnnnnnnnnnnnnnnnnnnnnnnnnnnnnnnnnnnnnnnnnnnnnnnnnnnnnnnnnnnnnnnnnnnnnnnnnnnnnnnnnnnnnnnnnnnnnnnnnnnnnnnnnnnnnnnnnnnnnnnnnnnnnnnnnnnnnnnnnnnnnnnnnnnnnnnnnnnnnnnnnnnnnnnnnnnnnnnnnnnnnnnnnnnnnnnnnnnnnnnnnnnnnnnnnnnnnnnnnnnnnnnnnnnnnnnnnnnnnnnnnnnnnnnnnnnnnnnnnnnnnnnnnnnnnnnnnnnnnnnnnnnnnnnnnnnnnnnnnnnnnnnnnnnnnnnnnnnnnnnnnnnnnnnnnnnnnnnnnnnnnnnnnnnnnnnnnnnnnnnnnnnnnnnnnnnnnnnnnnnnnnnnnnnnnnnnnnnnnnnnnnnnnnnnnnnnnnnnnnnnnnnnnnnnnnnnnnnnnnnnnnnnnnnnnnnnnnnnnnnnnnnnnnnnnnnnnnnnnnnnnnnnnnnnnnnnnnnnnnnnnnnnnnnnnnnnnnnnnnnnnnnnnnnnnnnnnnnnnnnnnnnnnnnnnnnnnnnnnnnnnnnnnnnnnnnnnnnnnnnnnnnnnnnnnnnnnnnnnnnnnnnnnnnnnnnnnnnnnnnnnnnnnnnnnnnnnnnnnnnnnnnnnnnnnnnnnnnnnnnnnnnnnnnnnnnnnnnnnnnnnnnnnnnnnnnnnnnnnnnnnnnnnnnnnnnnnnnnnnnnnnnnnnnnnnnnnnnnnnnnnnnnnnnnnnnnnnnnnnnnnnnnnnnnnnnnnnnnnnnnnnnnnnnnnnnnnnnnnnnnnnnnnnnnnnnnnnnnnnnnnnnnnnnnnnnnnnnnnnnnnnnnnnnnnnnnnnnnnnnnnnnnnnnnnnnnnnnnnnnnnnnnnnnnnnnnnnnnnnnnnnnnnnnnnnnnnnnnnnnnnnnnnnnnnnnnnnnnnnnnnnnnnnnnnnnnnnnnnnnnnnnnnnnnnnnnnnnnnnnnnnnnnnnnnnnnnnnnnnnnnnnnnnnnnnnnnnnnnnnnnnnnnnnnnnnnnnnnnnnnnnnnnnnnnnnnnnnnnnnnnnnnnnnnnnnnnnnnnnnnnnnnnnnnnnnnnnnnnnnnnnnnnnnnnnnnnnnnnnnnnnnnnnnnnnnnnnnnnnnnnnnnnnnnnnnnnnnnnnnnnnnnnnnnnnnnnnnnnnnnnnnnnnnnnnnnnnnnnnnnnnnnnnnnnnnnnnnnnnnnnnnnnnnnnnnnnnnnnnnnnnnnnnnnnnnnnnnnnnnnnnnnnnnnnnnnnnnnnnnnnnnnnnnnnnnnnnnnnnnnnnnnnnnnnnnnnnnnnnnnnnnnnnnnnnnnnnnnnnnnnnnnnnnnnnnnnnnnnnnnnnnnnnnnnnnnnnnnnnnnnnnnnnnnnnnnnnnnnnnnnnnnnnnnnnnnnnnnnnnnnnnnnnnnnnnnnnnnnnnnnnnnnnnnnnnnnnnnnnnnnnnnnnnnnnnnnnnnnnnnnnnnnnnnnnnnnnnnnnnnnnnnnnnnnnnnnnnnnnnnnnnnnnnnnnnnnnnnnnnnnnnnnnnnnnnnnnnnnnnnnnnnnnnnnnnnnnnnnnnnnnnnnnnnnnnnnnnnnnnnnnnnnnnnnnnnnnnnnnnnnnnnnnnnnnnnnnnnnnnnnnnnnnnnnnnnnnnnnnnnnnnnnnnnnnnnnnnnnnnnnnnnnnnnnnnnnnnnnnnnnnnnnnnnnnnnnnnnnnnnnnnnnnnnnnnnnnnnnnnnnnnnnnnnnnnnnnnnnnnnnnnnnnnnnnnnnnnnnnnnnnnnnnnnnnnnnnnnnnnnnnnnnnnnnnnnnnnnnnnnnnnnnnnnnnnnnnnnnnnnnnnnnnnnnnnnnnnnnnnnnnnnnnnnnnnnnnnnnnnnnnnnnnnnnnnnnnnnnnnnnnnnnnnnnnnnnnnnnnnnnnnnnnnnnnnnnnnnnnnnnnnnnnnnnnnnnnnnnnnnnnnnnnnnnnnnnnnnnnnnnnnnnnnnnnnnnnnnnnnnnnnnnnnnnnnnnnnnnnnnnnnnnnnnnnnnnnnnnnnnnnnnnnnnnnnnnnnnnnnnnnnnnnnnnnnnnnnnnnnnnnnnnnnnnnnnnnnnnnnnnnnnnnnnnnnnnnnnnnnnnnnnnnnnnnnnnnnnnnnnnnnnnnnnnnnnnnnnnnnnnnnnnnnnnnnnnnnnnnnnnnnnnnnnnnnnnnnnnnnnnnnnnnnnnnnnnnnnnnnnnnnnnnnnnnnnnnnnnnnnnnnnnnnnnnnnnnnnnnnnnnnnnnnnnnnnnnnnnnnnnnnnnnnnnnnnnnnnnnnnnnnnnnnnnnnnnnnnnnnnnnnnnnnnnnnnnnnnnnnnnnnnnnnnnnnnnnnnnnnnnnnnnnnnnnnnnnnnnnnnnnnnnnnnnnnnnnnnnnnnnnnnnnnnnnnnnnnnnnnnnnnnnnnnnnnnnnnnnnnnnnnnnnnnnnnnnnnnnnnnnnnnnnnnnnnnnnnnnnnnnnnnnnnnnnnnnnnnnnnnnnnnnnnnnnnnnnnnnnnnnnnnnnnnnnnnnnnnnnnnnnnnnnnnnnnnnnnnnnnnnnnnnnnnnnnnnnnnnnnnnnnnnnnnnnnnnnnnnnnnnnnnnnnnnnnnnnnnnnnnnnnnnnnnnnnnnnnnnnnnnnnnnnnnnnnnnnnnnnnnnnnnnnnnnnnnnnnnnnnnnnnnnnnnnnnnnnnnnnnnnnnnnnnnnnnnnnnnnnnnnnnnnnnnnnnnnnnnnnnnnnnnnnnnnnnnnnnnnnnnnnnnnnnnnnnnnnnnnnnnnnnnnnnnnnnnnnnnnnnnnnnnnnnnnnnnnnnnnnnnnnnnnnnnnnnnnnnnnnnnnnnnnnnnnnnnnnnnnnnnnnnnnnnnnnnnnnnnnnnnnnnnnnnnnnnnnnnnnnnnnnnnnnnnnnnnnnnnnnnnnnnnnnnnnnnnnnnnnnnnnnnnnnnnnnnnnnnnnnnnnnnnnnnnnnnnnnnnnnnnnnnnnnnnnnnnnnnnnnnnnnnnnnnnnnnnnnnnnnnnnnnnnnnnnnnnnnnnnnnnnnnnnnnnnnnnnnnnnnnnnnnnnnnnnnnnnnnnnnnnnnnnnnnnnnnnnnnnnnnnnnnnnnnnnnnnnnnnnnnnnnnnnnnnnnnnnnnnnnnnnnnnnnnnnnnnnnnnnnnnnnnnnnnnnnnnnnnnnnnnnnnnnnnnnnnnnnnnnnnnnnnnnnnnnnnnnnnnnnnnnnnnnnnnnnnnnnnnnnnnnnnnnnnnnnnnnnnnnnnnnnnnnnnnnnnnnnnnnnnnnnnnnnnnnnnnnnnnnnnnnnnnnnnnnnnnnnnnnnnnnnnnnnnnnnnnnnnnnnnnnnnnnnnnnnnnnnnnnnnnnnnnnnnnnnnnnnnnnnnnnnnnnnnnnnnnnnnnnnnnnnnnnnnnnnnnnnnnnnnnnnnnnnnnnnnnnnnnnnnnnnnnnnnnnnnnnnnnnnnnnnnnnnnnnnnnnnnnnnnnnnnnnnnnnnnnnnnnnnnnnnnnnnnnnnnnnnnnnnnnnnnnnnnnnnnnnnnnnnnnnnnnnnnnnnnnnnnnnnnnnnnnnnnnnnnnnnnnnnnnnnnnnnnnnnnnnnnnnnnnnnnnnnnnnnnnnnnnnnnnnnnnnnnnnnnnnnnnnnnnnnnnnnnnnnnnnnnnnnnnnnnnnnnnnnnnnnnnnnnnnnnnnnnnnnnnnnnnnnnnnnnnnnnnnnnnnnnnnnnnnnnnnnnnnnnnnnnnnnnnnnnnnnnnnnnnnnnnnnnnnnnnnnnnnnnnnnnnnnnnnnnnnnnnnnnnnnnnnnnnnnnnnnnnnnnnnnnnnnnnnnnnnnnnnnnnnnnnnnnnnnnnnnnnnnnnnnnnnnnnnnnnnnnnnnnnnnnnnnnnnnnnnnnnnnnnnnnnnnnnnnnnnnnnnnnnnnnnnnnnnnnnnnnnnnnnnnnnnnnnnnnnnnnnnnnnnnnnnnnnnnnnnnnnnnnnnnnnnnnnnnnnnnnnnnnnnnnnnnnnnnnnnnnnnnnnnnnnnnnnnnnnnnnnnnnnnnnnnnnnnnnnnnnnnnnnnnnnnnnnnnnnnnnnnnnnnnnnnnnnnnnnnnnnnnnnnnnnnnnnnnnnnnnnnnnnnnnnnnnnnnnnnnnnnnnnnnnnnnnnnnnnnnnnnnnnnnnnnnnnnnnnnnnnnnnnnnnnnnnnnnnnnnnnnnnnnnnnnnnnnnnnnnnnnnnnnnnnnnnnnnnnnnnnnnnnnnnnnnnnnnnnnnnnnnnnnnnnnnnnnnnnnnnnnnnnnnnnnnnnnnnnnnnnnnnnnnnnnnnnnnnnnnnnnnnnnnnnnnnnnnnnnnnnnnnnnnnnnnnnnnnnnnnnnnnnnnnnnnnnnnnnnnnnnnnnnnnnnnnnnnnnnnnnnnnnnnnnnnnnnnnnnnnnnnnnnnnnnnnnnnnnnnnnnnnnnnnnnnnnnnnnnnnnnnnnnnnnnnnnnnnnnnnnnnnnnnnnnnnnnnnnnnnnnnnnnnnnnnnnnnnnnnnnnnnnnnnnnnnnnnnnnnnnnnnnnnnnnnnnnnnnnnnnnnnnnnnnnnnnnnnnnnnnnnnnnnnnnnnnnnnnnnnnnnnnnnnnnnnnnnnnnnnnnnnnnnnnnnnnnnnnnnnnnnnnnnnnnnnnnnnnnnnnnnnnnnnnnnnnnnnnnnnnnnnnnnnnnnnnnnnnnnnnnnnnnnnnnnnnnnnnnnnnnnnnnnnnnnnnnnnnnnnnnnnnnnnnnnnnnnnnnnnnnnnnnnnnnnnnnnnnnnnnnnnnnnnnnnnnnnnnnnnnnnnnnnnnnnnnnnnnnnnnnnnnnnnnnnnnnnnnnnnnnnnnnnnnnnnnnnnnnnnnnnnnnnnnnnnnnnnnnnnnnnnnnnnnnnnnnnnnnnnnnnnnnnnnnnnnnnnnnnnnnnnnnnnnnnnnnnnnnnnnnnnnnnnnnnnnnnnnnnnnnnnnnnnnnnnnnnnnnnnnnnnnnnnnnnnnnnnnnnnnnnnnnnnnnnnnnnnnnnnnnnnnnnnnnnnnnnnnnnnnnnnnnnnnnnnnnnnnnnnnnnnnnnnnnnnnnnnnnnnnnnnnnnnnnnnnnnnnnnnnnnnnnnnnnnnnnnnnnnnnnnnnnnnnnnnnnnnnnnnnnnnnnnnnnnnnnnnnnnnnnnnnnnnnnnnnnnnnnnnnnnnnnnnnnnnnnnnnnnnnnnnnnnnnnnnnnnnnnnnnnnnnnnnnnnnnnnnnnnnnnnnnnnnnnnnnnnnnnnnnnnnnnnnnnnnnnnnnnnnnnnnnnnnnnnnnnnnnnnnnnnnnnnnnnnnnnnnnnnnnnnnnnnnnnnnnnnnnnnnnnnnnnnnnnnnnnnnnnnnnnnnnnnnnnnnnnnnnnnnnnnnnnnnnnnnnnnnnnnnnnnnnnnnnnnnnnnnnnnnnnnnnnnnnnnnnnnnnnnnnnnnnnnnnnnnnnnnnnnnnnnnnnnnnnnnnnnnnnnnnnnnnnnnnnnnnnnnnnnnnnnnnnnnnnnnnnnnnnnnnnnnnnnnnnnnnnnnnnnnnnnnnnnnnnnnnnnnnnnnnnnnnnnnnnnnnnnnnnnnnnnnnnnnnnnnnnnnnnnnnnnnnnnnnnnnnnnnnnnnnnnnnnnnnnnnnnnnnnnnnnnnnnnnnnnnnnnnnnnnnnnnnnnnnnnnnnnnnnnnnnnnnnnnnnnnnnnnnnnnnnnnnnnnnnnnnnnnnnnnnnnnnnnnnnnnnnnnnnnnnnnnnnnnnnnnnnnnnnnnnnnnnnnnnnnnnnnnnnnnnnnnnnnnnnnnnnnnnnnnnnnnnnnnnnnnnnnnnnnnnnnnnnnnnnnnnnnnnnnnnnnnnnnnnnnnnnnnnnnnnnnnnnnnnnnnnnnnnnnnnnnnnnnnnnnnnnnnnnnnnnnnnnnnnnnnnnnnnnnnnnnnnnnnnnnnnnnnnnnnnnnnnnnnnnnnnnnnnnnnnnnnnnnnnnnnnnnnnnnnnnnnnnnnnnnnnnnnnnnnnnnnnnnnnnnnnnnnnnnnnnnnnnnnnnnnnnnnnnnnnnnnnnnnnnnnnnnnnnnnnnnnnnnnnnnnnnnnnnnnnnnnnnnnnnnnnnnnnnnnnnnnnnnnnnnnnnnnnnnnnnnnnnnnnnnnnnnnnnnnnnnnnnnnnnnnnnnnnnnnnnnnnnnnnnnnnnnnnnnnnnnnnnnnnnnnnnnnnnnnnnnnnnnnnnnnnnnnnnnnnnnnnnnnnnnnnnnnnnnnnnnnnnnnnnnnnnnnnnnnnnnnnnnnnnnnnnnnnnnnnnnnnnnnnnnnnnnnnnnnnnnnnnnnnnnnnnnnnnnnnnnnnnnnnnnnnnnnnnnnnnnnnnnnnnnnnnnnnnnnnnnnnnnnnnnnnnnnnnnnnnnnnnnnnnnnnnnnnnnnnnnnnnnnnnnnnnnnnnnnnnnnnnnnnnnnnnnnnnnnnnnnnnnnnnnnnnnnnnnnnnnnnnnnnnnnnnnnnnnnnnnnnnnnnnnnnnnnnnnnnnnnnnnnnnnnnnnnnnnnnnnnnnnnnnnnnnnnnnnnnnnnnnnnnnnnnnnnnnnnnnnnnnnnnnnnnnnnnnnnnnnnnnnnnnnnnnnnnnnnnnnnnnnnnnnnnnnnnnnnnnnnnnnnnnnnnnnnnnnnnnnnnnnnnnnnnnnnnnnnnnnnnnnnnnnnnnnnnnnnnnnnnnnnnnnnnnnnnnnnnnnnnnnnnnnnnnnnnnnnnnnnnnnnnnnnnnnnnnnnnnnnnnnnnnnnnnnnnnnnnnnnnnnnnnnnnnnnnnnnnnnnnnnnnnnnnnnnnnnnnnnnnnnnnnnnnnnnnnnnnnnnnnnnnnnnnnnnnnnnnnnnnnnnnnnnnnnnnnnnnnnnnnnnnnnnnnnnnnnnnnnnnnnnnnnnnnnnnnnnnnnnnnnnnnnnnnnnnnnnnnnnnnnnnnnnnnnnnnnnnnnnnnnnnnnnnnnnnnnnnnnnnnnnnnnnnnnnnnnnnnnnnnnnnnnnnnnnnnnnnnnnnnnnnnnnnnnnnnnnnnnnnnnnnnnnnnnnnnnnnnnnnnnnnnnnnnnnnnnnnnnnnnnnnnnnnnnnnnnnnnnnnnnnnnnnnnnnnnnnnnnnnnnnnnnnnnnnnnnnnnnnnnnnnnnnnnnnnnnnnnnnnnnnnnnnnnnnnnnnnnnnnnnnnnnnnnnnnnnnnnnnnnnnnnnnnnnnnnnnnnnnnnnnnnnnnnnnnnnnnnnnnnnnnnnnnnnnnnnnnnnnnnnnnnnnnnnnnnnnnnnnnnnnnnnnnnnnnnnnnnnnnnnnnnnnnnnnnnnnnnnnnnnnnnnnnnnnnnnnnnnnnnnnnnnnnnnnnnnnnnnnnnnnnnnnnnnnnnnnnnnnnnnnnnnnnnnnnnnnnnnnnnnnnnnnnnnnnnnnnnnnnnnnnnnnnnnnnnnnnnnnnnnnnnnnnnnnnnnnnnnnnnnnnnnnnnnnnnnnnnnnnnnnnnnnnnnnnnnnnnnnnnnnnnnnnnnnnnnnnnnnnnnnnnnnnnnnnnnnnnnnnnnnnnnnnnnnnnnnnnnnnnnnnnnnnnnnnnnnnnnnnnnnnnnnnnnnnnnnnnnnnnnnnnnnnnnnnnnnnnnnnnnnnnnnnnnnnnnnnnnnnnnnnnnnnnnnnnnnnnnnnnnnnnnnnnnnnnnnnnnnnnnnnnnnnnnnnnnnnnnnnnnnnnnnnnnnnnnnnnnnnnnnnnnnnnnnnnnnnnnnnnnnnnnnnnnnnnnnnnnnnnnnnnnnnnnnnnnnnnnnnnnnnnnnnnnnnnnnnnnnnnnnnnnnnnnnnnnnnnnnnnnnnnnnnnnnnnnnnnnnnnnnnnnnnnnnnnnnnnnnnnnnnnnnnnnnnnnnnnnnnnnnnnnnnnnnnnnnnnnnnnnnnnnnnnnnnnnnnnnnnnnnnnnnnnnnnnnnnnnnnnnnnnnnnnnnnnnnnnnnnnnnnnnnnnnnnnnnnnnnnnnnnnnnnnnnnnnnnnnnnnnnnnnnnnnnnnnnnnnnnnnnnnnnnnnnnnnnnnnnnnnnnnnnnnnnnnnnnnnnnnnnnnnnnnnnnnnnnnnnnnnnnnnnnnnnnnnnnnnnnnnnnnnnnnnnnnnnnnnnnnnnnnnnnnnnnnnnnnnnnnnnnnnnnnnnnnnnnnnnnnnnnnnnnnnnnnnnnnnnnnnnnnnnnnnnnnnnnnnnnnnnnnnnnnnnnnnnnnnnnnnnnnnnnnnnnnnnnnnnnnnnnnnnnnnnnnnnnnnnnnnnnnnnnnnnnnnnnnnnnnnnnnnnnnnnnnnnnnnnnnnnnnnnnnnnnnnnnnnnnnnnnnnnnnnnnnnnnnnnnnnnnnnnnnnnnnnnnnnnnnnnnnnnnnnnnnnnnnnnnnnnnnnnnnnnnnnnnnnnnnnnnnnnnnnnnnnnnnnnnnnnnnnnnnnnnnnnnnnnnnnnnnnnnnnnnnnnnnnnnnnnnnnnnnnnnnnnnnnnnnnnnnnnnnnnnnnnnnnnnnnnnnnnnnnnnnnnnnnnnnnnnnnnnnnnnnnnnnnnnnnnnnnnnnnnnnnnnnnnnnnnnnnnnnnnnnnnnnnnnnnnnnnnnnnnnnnnnnnnnnnnnnnnnnnnnnnnnnnnnnnnnnnnnnnnnnnnnnnnnnnnnnnnnnnnnnnnnnnnnnnnnnnnnnnnnnnnnnnnnnnnnnnnnnnnnnnnnnnnnnnnnnnnnnnnnnnnnnnnnnnnnnnnnnnnnnnnnnnnnnnnnnnnnnnnnnnnnnnnnnnnnnnnnnnnnnnnnnnnnnnnnnnnnnnnnnnnnnnnnnnnnnnnnnnnnnnnnnnnnnnnnnnnnnnnnnnnnnnnnnnnnnnnnnnnnnnnnnnnnnnnnnnnnnnnnnnnnnnnnnnnnnnnnnnnnnnnnnnnnnnnnnnnnnnnnnnnnnnnnnnnnnnnnnnnnnnnnnnnnnnnnnnnnnnnnnnnnnnnnnnnnnnnnnnnnnnnnnnnnnnnnnnnnnnnnnnnnnnnnnnnnnnnnnnnnnnnnnnnnnnnnnnnnnnnnnnnnnnnnnnnnnnnnnnnnnnnnnnnnnnnnnnnnnnnnnnnnnnnnnnnnnnnnnnnnnnnnnnnnnnnnnnnnnnnnnnnnnnnnnnnnnnnnnnnnnnnnnnnnnnnnnnnnnnnnnnnnnnnnnnnnnnnnnnnnnnnnnnnnnnnnnnnnnnnnnnnnnnnnnnnnnnnnnnnnnnnnnnnnnnnnnnnnnnnnnnnnnnnnnnnnnnnnnnnnnnnnnnnnnnnnnnnnnnnnnnnnnnnnnnnnnnnnnnnnnnnnnnnnnnnnnnnnnnnnnnnnnnnnnnnnnnnnnnnnnnnnnnnnnnnnnnnnnnnnnnnnnnnnnnnnnnnnnnnnnnnnnnnnnnnnnnnnnnnnnnnnnnnnnnnnnnnnnnnnnnnnnnnnnnnnnnnnnnnnnnnnnnnnnnnnnnnnnnnnnnnnnnnnnnnnnnnnnnnnnnnnnnnnnnnnnnnnnnnnnnnnnnnnnnnnnnnnnnnnnnnnnnnnnnnnnnnnnnnnnnnnnnnnnnnnnnnnnnnnnnnnnnnnnnnnnnnnnnnnnnnnnnnnnnnnnnnnnnnnnnnnnnnnnnnnnnnnnnnnnnnnnnnnnnnnnnnnnnnnnnnnnnnnnnnnnnnnnnnnnnnnnnnnnnnnnnnnnnnnnnnnnnnnnnnnnnnnnnnnnnnnnnnnnnnnnnnnnnnnnnnnnnnnnnnnnnnnnnnnnnnnnnnnnnnnnnnnnnnnnnnnnnnnnnnnnnnnnnnnnnnnnnnnnnnnnnnnnnnnnnnnnnnnnnnnnnnnnnnnnnnnnnnnnnnnnnnnnnnnnnnnnnnnnnnnnnnnnnnnnnnnnnnnnnnnnnnnnnnnnnnnnnnnnnnnnnnnnnnnnnnnnnnnnnnnnnnnnnnnnnnnnnnnnnnnnnnnnnnnnnnnnnnnnnnnnnnnnnnnnnnnnnnnnnnnnnnnnnnnnnnnnnnnnnnnnnnnnnnnnnnnnnnnnnnnnnnnnnnnnnnnnnnnnnnnnnnnnnnnnnnnnnnnnnnnnnnnnnnnnnnnnnnnnnnnnnnnnnnnnnnnnnnnnnnnnnnnnnnnnnnnnnnnnnnnnnnnnnnnnnnnnnnnnnnnnnnnnnnnnnnnnnnnnnnnnnnnnnnnnnnnnnnnnnnnnnnnnnnnnnnnnnnnnnnnnnnnnnnnnnnnnnnnnnnnnnnnnnnnnnnnnnnnnnnnnnnnnnnnnnnnnnnnnnnnnnnnnnnnnnnnnnnnnnnnnnnnnnnnnnnnnnnnnnnnnnnnnnnnnnnnnnnnnnnnnnnnnnnnnnnnnnnnnnnnnnnnnnnnnnnnnnnnnnnnnnnnnnnnnnnnnnnnnnnnnnnnnnnnnnnnnnnnnnnnnnnnnnnnnnnnnnnnnnnnnnnnnnnnnnnnnnnnnnnnnnnnnnnnnnnnnnnnnnnnnnnnnnnnnnnnnnnnnnnnnnnnnnnnnnnnnnnnnnnnnnnnnnnnnnnnnnnnnnnnnnnnnnnnnnnnnnnnnnnnnnnnnnnnnnnnnnnnnnnnnnnnnnnnnnnnnnnnnnnnnnnnnnnnnnnnnnnnnnnnnnnnnnnnnnnnnnnnnnnnnnnnnnnnnnnnnnnnnnnnnnnnnnnnnnnnnnnnnnnnnnnnnnnnnnnnnnnnnnnnnnnnnnnnnnnnnnnnnnnnnnnnnnnnnnnnnnnnnnnnnnnnnnnnnnnnnnnnnnnnnnnnnnnnnnnnnnnnnnnnnnnnnnnnnnnnnnnnnnnnnnnnnnnnnnnnnnnnnnnnnnnnnnnnnnnnnnnnnnnnnnnnnnnnnnnnnnnnnnnnnnnnnnnnnnnnnnnnnnnnnnnnnnnnnnnnnnnnnnnnnnnnnnnnnnnnnnnnnnnnnnnnnnnnnnnnnnnnnnnnnnnnnnnnnnnnnnnnnnnnnnnnnnnnnnnnnnnnnnnnnnnnnnnnnnnnnnnnnnnnnnnnnnnnnnnnnnnnnnnnnnnnnnnnnnnnnnnnnnnnnnnnnnnnnnnnnnnnnnnnnnnnnnnnnnnnnnnnnnnnnnnnnnnnnnnnnnnnnnnnnnnnnnnnnnnnnnnnnnnnnnnnnnnnnnnnnnnnnnnnnnnnnnnnnnnnnnnnnnnnnnnnnnnnnnnnnnnnnnnnnnnnnnnnnnnnnnnnnnnnnnnnnnnnnnnnnnnnnnnnnnnnnnnnnnnnnnnnnnnnnnnnnnnnnnnnnnnnnnnnnnnnnnnnnnnnnnnnnnnnnnnnnnnnnnnnnnnnnnnnnnnnnnnnnnnnnnnnnnnnnnnnnnnnnnnnnnnnnnnnnnnnnnnnnnnnnnnnnnnnnnnnnnnnnnnnnnnnnnnnnnnnnnnnnnnnnnnnnnnnnnnnnnnnnnnnnnnnnnnnnnnnnnnnnnnnnnnnnnnnnnnnnnnnnnnnnnnnnnnnnnnnnnnnnnnnnnnnnnnnnnnnnnnnnnnnnnnnnnnnnnnnnnnnnnnnnnnnnnnnnnnnnnnnnnnnnnnnnnnnnnnnnnnnnnnnnnnnnnnnnnnnnnnnnnnnnnnnnnnnnnnnnnnnnnnnnnnnnnnnnnnnnnnnnnnnnnnnnnnnnnnnnnnnnnnnnnnnnnnnnnnnnnnnnnnnnnnnnnnnnnnnnnnnnnnnnnnnnnnnnnnnnnnnnnnnnnnnnnnnnnnnnnnnnnnnnnnnnnnnnnnnnnnnnnnnnnnnnnnnnnnnnnnnnnnnnnnnnnnnnnnnnnnnnnnnnnnnnnnnnnnnnnnnnnnnnnnnnnnnnnnnnnnnnnnnnnnnnnnnnnnnnnnnnnnnnnnnnnnnnnnnnnnnnnnnnnnnnnnnnnnnnnnnnnnnnnnnnnnnnnnnnnnnnnnnnnnnnnnnnnnnnnnnnnnnnnnnnnnnnnnnnnnnnnnnnnnnnnnnnnnnnnnnnnnnnnnnnnnnnnnnnnnnnnnnnnnnnnnnnnnnnnnnnnnnnnnnnnnnnnnnnnnnnnnnnnnnnnnnnnnnnnnnnnnnnnnnnnnnnnnnnnnnnnnnnnnnnnnnnnnnnnnnnnnnnnnnnnnnnnnnnnnnnnnnnnnnnnnnnnnnnnnnnnnnnnnnnnnnnnnnnnnnnnnnnnnnnnnnnnnnnnnnnnnnnnnnnnnnnnnnnnnnnnnnnnnnnnnnnnnnnnnnnnnnnnnnnnnnnnnnnnnnnnnnnnnnnnnnnnnnnnnnnnnnnnnnnnnnnnnnnnnnnnnnnnnnnnnnnnnnnnnnnnnnnnnnnnnnnnnnnnnnnnnnnnnnnnnnnnnnnnnnnnnnnnnnnnnnnnnnnnnnnnnnnnnnnnnnnnnnnnnnnnnnnnnnnnnnnnnnnnnnnnnnnnnnnnnnnnnnnnnnnnnnnnnnnnnnnnnnnnnnnnnnnnnnnnnnnnnnnnnnnnnnnnnnnnnnnnnnnnnnnnnnnnnnnnnnnnnnnnnnnnnnnnnnnnnnnnnnnnnnnnnnnnnnnnnnnnnnnnnnnnnnnnnnnnnnnnnnnnnnnnnnnnnnnnnnnnnnnnnnnnnnnnnnnnnnnnnnnnnnnnnnnnnnnnnnnnnnnnnnnnnnnnnnnnnnnnnnnnnnnnnnnnnnnnnnnnnnnnnnnnnnnnnnnnnnnnnnnnnnnnnnnnnnnnnnnnnnnnnnnnnnnnnnnnnnnnnnnnnnnnnnnnnnnnnnnnnnnnnnnnnnnnnnnnnnnnnnnnnnnnnnnnnnnnnnnnnnnnnnnnnnnnnnnnnnnnnnnnnnnnnnnnnnnnnnnnnnnnnnnnnnnnnnnnnnnnnnnnnnnnnnnnnnnnnnnnnnnnnnnnnnnnnnnnnnnnnnnnnnnnnnnnnnnnnnnnnnnnnnnnnnnnnnnnnnnnnnnnnnnnnnnnnnnnnnnnnnnnnnnnnnnnnnnnnnnnnnnnnnnnnnnnnnnnnnnnnnnnnnnnnnnnnnnnnnnnnnnnnnnnnnnnnnnnnnnnnnnnnnnnnnnnnnnnnnnnnnnnnnnnnnnnnnnnnnnnnnnnnnnnnnnnnnnnnnnnnnnnnnnnnnnnnnnnnnnnnnnnnnnnnnnnnnnnnnnnnnnnnnnnnnnnnnnnnnnnnnnnnnnnnnnnnnnnnnnnnnnnnnnnnnnnnnnnnnnnnnnnnnnnnnnnnnnnnnnnnnnnnnnnnnnnnnnnnnnnnnnnnnnnnnnnnnnnnnnnnnnnnnnnnnnnnnnnnnnnnnnnnnnnnnnnnnnnnnnnnnnnnnnnnnnnnnnnnnnnnnnnnnnnnnnnnnnnnnnnnnnnnnnnnnnnnnnnnnnnnnnnnnnnnnnnnnnnnnnnnnnnnnnnnnnnnnnnnnnnnnnnnnnnnnnnnnnnnnnnnnnnnnnnnnnnnnnnnnnnnnnnnnnnnnnnnnnnnnnnnnnnnnnnnnnnnnnnnnnnnnnnnnnnnnnnnnnnnnnnnnnnnnnnnnnnnnnnnnnnnnnnnnnnnnnnnnnnnnnnnnnnnnnnnnnnnnnnnnnnnnnnnnnnnnnnnnnnnnnnnnnnnnnnnnnnnnnnnnnnnnnnnnnnnnnnnnnnnnnnnnnnnnnnnnnnnnnnnnnnnnnnnnnnnnnnnnnnnnnnnnnnnnnnnnnnnnnnnnnnnnnnnnnnnnnnnnnnnnnnnnnnnnnnnnnnnnnnnnnnnnnnnnnnnnnnnnnnnnnnnnnnnnnnnnnnnnnnnnnnnnnnnnnnnnnnnnnnnnnnnnnnnnnnnnnnnnnnnnnnnnnnnnnnnnnnnnnnnnnnnnnnnnnnnnnnnnnnnnnnnnnnnnnnnnnnnnnnnnnnnnnnnnnnnnnnnnnnnnnnnnnnnnnnnnnnnnnnnnnnnnnnnnnnnnnnnnnnnnnnnnnnnnnnnnnnnnnnnnnnnnnnnnnnnnnnnnnnnnnnnnnnnnnnnnnnnnnnnnnnnnnnnnnnnnnnnnnnnnnnnnnnnnnnnnnnnnnnnnnnnnnnnnnnnnnnnnnnnnnnnnnnnnnnnnnnnnnnnnnnnnnnnnnnnnnnnnnnnnnnnnnnnnnnnnnnnnnnnnnnnnnnnnnnnnnnnnnnnnnnnnnnnnnnnnnnnnnnnnnnnnnnnnnnnnnnnnnnnnnnnnnnnnnnnnnnnnnnnnnnnnnnnnnnnnnnnnnnnnnnnnnnnnnnnnnnnnnnnnnnnnnnnnnnnnnnnnnnnnnnnnnnnnnnnnnnnnnnnnnnnnnnnnnnnnnnnnnnnnnnnnnnnnnnnnnnnnnnnnnnnnnnnnnnnnnnnnnnnnnnnnnnnnnnnnnnnnnnnnnnnnnnnnnnnnnnnnnnnnnnnnnnnnnnnnnnnnnnnnnnnnnnnnnnnnnnnnnnnnnnnnnnnnnnnnnnnnnnnnnnnnnnnnnnnnnnnnnnnnnnnnnnnnnnnnnnnnnnnnnnnnnnnnnnnnnnnnnnnnnnnnnnnnnnnnnnnnnnnnnnnnnnnnnnnnnnnnnnnnnnnnnnnnnnnnnnnnnnnnnnnnnnnnnnnnnnnnnnnnnnnnnnnnnnnnnnnnnnnnnnnnnnnnnnnnnnnnnnnnnnnnnnnnnnnnnnnnnnnnnnnnnnnnnnnnnnnnnnnnnnnnnnnnnnnnnnnnnnnnnnnnnnnnnnnnnnnnnnnnnnnnnnnnnnnnnnnnnnnnnnnnnnnnnnnnnnnnnnnnnnnnnnnnnnnnnnnnnnnnnnnnnnnnnnnnnnnnnnnnnnnnnnnnnnnnnnnnnnnnnnnnnnnnnnnnnnnnnnnnnnnnnnnnnnnnnnnnnnnnnnnnnnnnnnnnnnnnnnnnnnnnnnnnnnnnnnnnnnnnnnnnnnnnnnnnnnnnnnnnnnnnnnnnnnnnnnnnnnnnnnnnnnnnnnnnnnnnnnnnnnnnnnnnnnnnnnnnnnnnnnnnnnnnnnnnnnnnnnnnnnnnnnnnnnnnnnnnnnnnnnnnnnnnnnnnnnnnnnnnnnnnnnnnnnnnnnnnnnnnnnnnnnnnnnnnnnnnnnnnnnnnnnnnnnnnnnnnnnnnnnnnnnnnnnnnnnnnnnnnnnnnnnnnnnnnnnnnnnnnnnnnnnnnnnnnnnnnnnnnnnnnnnnnnnnnnnnnnnnnnnnnnnnnnnnnnnnnnnnnnnnnnnnnnnnnnnnnnnnnnnnnnnnnnnnnnnnnnnnnnnnnnnnnnnnnnnnnnnnnnnnnnnnnnnnnnnnnnnnnnnnnnnnnnnnnnnnnnnnnnnnnnnnnnnnnnnnnnnnnnnnnnnnnnnnnnnnnnnnnnnnnnnnnnnnnnnnnnnnnnnnnnnnnnnnnnnnnnnnnnnnnnnnnnnnnnnnnnnnnnnnnnnnnnnnnnnnnnnnnnnnnnnnnnnnnnnnnnnnnnnnnnnnnnnnnnnnnnnnnnnnnnnnnnnnnnnnnnnnnnnnnnnnnnnnnnnnnnnnnnnnnnnnnnnnnnnnnnnnnnnnnnnnnnnnnnnnnnnnnnnnnnnnnnnnnnnnnnnnnnnnnnnnnnnnnnnnnnnnnnnnnnnnnnnnnnnnnnnnnnnnnnnnnnnnnnnnnnnnnnnnnnnnnnnnnnnnnnnnnnnnnnnnnnnnnnnnnnnnnnnnnnnnnnnnnnnnnnnnnnnnnnnnnnnnnnnnnnnnnnnnnnnnnnnnnnnnnnnnnnnnnnnnnnnnnnnnnnnnnnnnnnnnnnnnnnnnnnnnnnnnnnnnnnnnnnnnnnnnnnnnnnnnnnnnnnnnnnnnnnnnnnnnnnnnnnnnnnnnnnnnnnnnnnnnnnnnnnnnnnnnnnnnnnnnnnnnnnnnnnnnnnnnnnnnnnnnnnnnnnnnnnnnnnnnnnnnnnnnnnnnnnnnnnnnnnnnnnnnnnnnnnnnnnnnnnnnnnnnnnnnnnnnnnnnnnnnnnnnnnnnnnnnnnnnnnnnnnnnnnnnnnnnnnnnnnnnnnnnnnnnnnnnnnnnnnnnnnnnnnnnnnnnnnnnnnnnnnnnnnnnnnnnnnnnnnnnnnnnnnnnnnnnnnnnnnnnnnnnnnnnnnnnnnnnnnnnnnnnnnnnnnnnnnnnnnnnnnnnnnnnnnnnnnnnnnnnnnnnnnnnnnnnnnnnnnnnnnnnnnnnnnnnnnnnnnnnnnnnnnnnnnnnnnnnnnnnnnnnnnnnnnnnnnnnnnnnnnnnnnnnnnnnnnnnnnnnnnnnnnnnnnnnnnnnnnnnnnnnnnnnnnnnnnnnnnnnnnnnnnnnnnnnnnnnnnnnnnnnnnnnnnnnnnnnnnnnnnnnnnnnnnnnnnnnnnnnnnnnnnnnnnnnnnnnnnnnnnnnnnnnnnnnnnnnnnnnnnnnnnnnnnnnnnnnnnnnnnnnnnnnnnnnnnnnnnnnnnnnnnnnnnnnnnnnnnnnnnnnnnnnnnnnnnnnnnnnnnnnnnnnnnnnnnnnnnnnnnnnnnnnnnnnnnnnnnnnnnnnnnnnnnnnnnnnnnnnnnnnnnnnnnnnnnnnnnnnnnnnnnnnnnnnnnnnnnnnnnnnnnnnnnnnnnnnnnnnnnnnnnnnnnnnnnnnnnnnnnnnnnnnnnnnnnnnnnnnnnnnnnnnnnnnnnnnnnnnnnnnnnnnnnnnnnnnnnnnnnnnnnnnnnnnnnnnnnnnnnnnnnnnnnnnnnnnnnnnnnnnnnnnnnnnnnnnnnnnnnnnnnnnnnnnnnnnnnnnnnnnnnnnnnnnnnnnnnnnnnnnnnnnnnnnnnnnnnnnnnnnnnnnnnnnnnnnnnnnnnnnnnnnnnnnnnnnnnnnnnnnnnnnnnnnnnnnnnnnnnnnnnnnnnnnnnnnnnnnnnnnnnnnnnnnnnnnnnnnnnnnnnnnnnnnnnnnnnnnnnnnnnnnnnnnnnnnnnnnnnnnnnnnnnnnnnnnnnnnnnnnnnnnnnnnnnnnnnnnnnnnnnnnnnnnnnnnnnnnnnnnnnnnnnnnnnnnnnnnnnnnnnnnnnnnnnnnnnnnnnnnnnnnnnnnnnnnnnnnnnnnnnnnnnnnnnnnnnnnnnnnnnnnnnnnnnnnnnnnnnnnnnnnnnnnnnnnnnnnnnnnnnnnnnnnnnnnnnnnnnnnnnnnnnnnnnnnnnnnnnnnnnnnnnnnnnnnnnnnnnnnnnnnnnnnnnnnnnnnnnnnnnnnnnnnnnnnnnnnnnnnnnnnnnnnnnnnnnnnnnnnnnnnnnnnnnnnnnnnnnnnnnnnnnnnnnnnnnnnnnnnnnnnnnnnnnnnnnnnnnnnnnnnnnnnnnnnnnnnnnnnnnnnnnnnnnnnnnnnnnnnnnnnnnnnnnnnnnnnnnnnnnnnnnnnnnnnnnnnnnnnnnnnnnnnnnnnnnnnnnnnnnnnnnnnnnnnnnnnnnnnnnnnnnnnnnnnnnnnnnnnnnnnnnnnnnnnnnnnnnnnnnnnnnnnnnnnnnnnnnnnnnnnnnnnnnnnnnnnnnnnnnnnnnnnnnnnnnnnnnnnnnnnnnnnnnnnnnnnnnnnnnnnnnnnnnnnnnnnnnnnnnnnnnnnnnnnnnnnnnnnnnnnnnnnnnnnnnnnnnnnnnnnnnnnnnnnnnnnnnnnnnnnnnnnnnnnnnnnnnnnnnnnnnnnnnnnnnnnnnnnnnnnnnnnnnnnnnnnnnnnnnnnnnnnnnnnnnnnnnnnnnnnnnnnnnnnnnnnnnnnnnnnnnnnnnnnnnnnnnnnnnnnnnnnnnnnnnnnnnnnnnnnnnnnnnnnnnnnnnnnnnnnnnnnnnnnnnnnnnnnnnnnnnnnnnnnnnnnnnnnnnnnnnnnnnnnnnnnnnnnnnnnnnnnnnnnnnnnnnnnnnnnnnnnnnnnnnnnnnnnnnnnnnnnnnnnnnnnnnnnnnnnnnnnnnnnnnnnnnnnnnnnnnnnnnnnnnnnnnnnnnnnnnnnnnnnnnnnnnnnnnnnnnnnnnnnnnnnnnnnnnnnnnnnnnnnnnnnnnnnnnnnnnnnnnnnnnnnnnnnnnnnnnnnnnnnnnnnnnnnnnnnnnnnnnnnnnnnnnnnnnnnnnnnnnnnnnnnnnnnnnnnnnnnnnnnnnnnnnnnnnnnnnnnnnnnnnnnnnnnnnnnnnnnnnnnnnnnnnnnnnnnnnnnnnnnnnnnnnnnnnnnnnnnnnnnnnnnnnnnnnnnnnnnnnnnnnnnnnnnnnnnnnnnnnnnnnnnnnnnnnnnnnnnnnnnnnnnnnnnnnnnnnnnnnnnnnnnnnnnnnnnnnnnnnnnnnnnnnnnnnnnnnnnnnnnnnnnnnnnnnnnnnnnnnnnnnnnnnnnnnnnnnnnnnnnnnnnnnnnnnnnnnnnnnnnnnnnnnnnnnnnnnnnnnnnnnnnnnnnnnnnnnnnnnnnnnnnnnnnnnnnnnnnnnnnnnnnnnnnnnnnnnnnnnnnnnnnnnnnnnnnnnnnnnnnnnnnnnnnnnnnnnnnnnnnnnnnnnnnnnnnnnnnnnnnnnnnnnnnnnnnnnnnnnnnnnnnnnnnnnnnnnnnnnnnnnnnnnnnnnnnnnnnnnnnnnnnnnnnnnnnnnnnnnnnnnnnnnnnnnnnnnnnnnnnnnnnnnnnnnnnnnnnnnnnnnnnnnnnnnnnnnnnnnnnnnnnnnnnnnnnnnnnnnnnnnnnnnnnnnnnnnnnnnnnnnnnnnnnnnnnnnnnnnnnnnnnnnnnnnnnnnnnnnnnnnnnnnnnnnnnnnnnnnnnnnnnnnnnnnnnnnnnnnnnnnnnnnnnnnnnnnnnnnnnnnnnnnnnnnnnnnnnnnnnnnnnnnnnnnnnnnnnnnnnnnnnnnnnnnnnnnnnnnnnnnnnnnnnnnnnnnnnnnnnnnnnnnnnnnnnnnnnnnnnnnnnnnnnnnnnnnnnnnnnnnnnnnnnnnnnnnnnnnnnnnnnnnnnnnnnnnnnnnnnnnnnnnnnnnnnnnnnnnnnnnnnnnnnnnnnnnnnnnnnnnnnnnnnnnnnnnnnnnnnnnnnnnnnnnnnnnnnnnnnnnnnnnnnnnnnnnnnnnnnnnnnnnnnnnnnnnnnnnnnnnnnnnnnnnnnnnnnnnnnnnnnnnnnnnnnnnnnnnnnnnnnnnnnnnnnnnnnnnnnnnnnnnnnnnnnnnnnnnnnnnnnnnnnnnnnnnnnnnnnnnnnnnnnnnnnnnnnnnnnnnnnnnnnnnnnnnnnnnnnnnnnnnnnnnnnnnnnnnnnnnnnnnnnnnnnnnnnnnnnnnnnnnnnnnnnnnnnnnnnnnnnnnnnnnnnnnnnnnnnnnnnnnnnnnnnnnnnnnnnnnnnnnnnnnnnnnnnnnnnnnnnnnnnnnnnnnnnnnnnnnnnnnnnnnnnnnnnnnnnnnnnnnnnnnnnnnnnnnnnnnnnnnnnnnnnnnnnnnnnnnnnnnnnnnnnnnnnnnnnnnnnnnnnnnnnnnnnnnnnnnnnnnnnnnnnnnnnnnnnnnnnnnnnnnnnnnnnnnnnnnnnnnnnnnnnnnnnnnnnnnnnnnnnnnnnnnnnnnnnnnnnnnnnnnnnnnnnnnnnnnnnnnnnnnnnnnnnnnnnnnnnnnnnnnnnnnnnnnnnnnnnnnnnnnnnnnnnnnnnnnnnnnnnnnnnnnnnnnnnnnnnnnnnnnnnnnnnnnnnnnnnnnnnnnnnnnnnnnnnnnnnnnnnnnnnnnnnnnnnnnnnnnnnnnnnnnnnnnnnnnnnnnnnnnnnnnnnnnnnnnnnnnnnnnnnnnnnnnnnnnnnnnnnnnnnnnnnnnnnnnnnnnnnnnnnnnnnnnnnnnnnnnnnnnnnnnnnnnnnnnnnnnnnnnnnnnnnnnnnnnnnnnnnnnnnnnnnnnnnnnnnnnnnnnnnnnnnnnnnnnnnnnnnnnnnnnnnnnnnnnnnnnnnnnnnnnnnnnnnnnnnnnnnnnnnnnnnnnnnnnnnnnnnnnnnnnnnnnnnnnnnnnnnnnnnnnnnnnnnnnnnnnnnnnnnnnnnnnnnnnnnnnnnnnnnnnnnnnnnnnnnnnnnnnnnnnnnnnnnnnnnnnnnnnnnnnnnnnnnnnnnnnnnnnnnnnnnnnnnnnnnnnnnnnnnnnnnnnnnnnnnnnnnnnnnnnnnnnnnnnnnnnnnnnnnnnnnnnnnnnnnnnnnnnnnnnnnnnnnnnnnnnnnnnnnnnnnnnnnnnnnnnnnnnnnnnnnnnnnnnnnnnnnnnnnnnnnnnnnnnnnnnnnnnnnnnnnnnnnnnnnnnnnnnnnnnnnnnnnnnnnnnnnnnnnnnnnnnnnnnnnnnnnnnnnnnnnnnnnnnnnnnnnnnnnnnnnnnnnnnnnnnnnnnnnnnnnnnnnnnnnnnnnnnnnnnnnnnnnnnnnnnnnnnnnnnnnnnnnnnnnnnnnnnnnnnnnnnnnnnnnnnnnnnnnnnnnnnnnnnnnnnnnnnnnnnnnnnnnnnnnnnnnnnnnnnnnnnnnnnnnnnnnnnnnnnnnnnnnnnnnnnnnnnnnnnnnnn
